(19) United States
(12) Patent Application Publication
(10) Pub. No.: US 2021/0309993 A1
(43) Pub. Date: Oct. 7, 2021

(54) RANDOMIZED PEPTIDE LIBRARIES PRESENTED BY HUMAN LEUKOCYTE ANTIGENS

(71) Applicant: 3T BIOSCIENCES, INC., SOUTH SAN FRANCISCO, CA (US)

(72) Inventors: MARVIN GEE, SAN FRANCISCO, CA (US); LEAH SIBENER, SAN FRANCISCO, CA (US)

(73) Assignee: 3T BIOSCIENCES, INC., SOUTH SAN FRANCISCO, CA (US)

(21) Appl. No.: 17/272,088

(22) PCT Filed: Aug. 30, 2019
(86) PCT No.: PCT/US2019/049205

§ 371 Date: Feb. 26, 2021

Related U.S. Application Data
(60) Provisional application No. 62/726,060, filed on Aug. 31, 2018.

(51) Int. Cl. C12N 15/10; C07K 14/74

(52) U.S. Cl. CPC C12N 15/1037; C07K 14/70539; C12N 15/1086

(57) ABSTRACT

Described herein is an antigen screening library comprising a plurality of Human Leukocyte Antigen (HLA)-antigen polypeptide complexes, the HLA-antigen polypeptide complexes comprising: (a) an HLA polypeptide; (b) a randomized antigen polypeptide comprising an amino acid sequence set forth in any one of SEQ ID NOs: 1 to 209, wherein the randomized antigen polypeptide is selected to specifically bind to peptide binding cleft of the HLA polypeptide; and (c) a β2 microglobulin polypeptide. These libraries can be used to determine antigenic polypeptides capable of interacting and stimulating a selected T cell receptor (TCR).

### CROSS-REFERENCE TO RELATED APPLICATIONS

[0001] The present application claims the benefit of U.S. Provisional Application No. 62/726,060, filed Aug. 31, 2018, the contents of which are hereby incorporated by reference in their entirety.

### BACKGROUND

[0002] T cells are vital to the adaptive immune response, having roles in response to infection and cancer. T cells recognize proteins derived from foreign pathogens as well as self, such as in cases of autoimmunity. Fragments of these proteins (e.g., peptides) are presented by human leukocyte antigen (HLA) molecules and recognized by the T cell via the T cell receptor (TCR).

[0003] Major histocompatibility class (MEW) I HLA molecules display peptides generated largely from processing endogenous antigens produced by the cell, such as self-antigens, but also foreign intracellular antigens such as peptides derived from viral proteins, into smaller peptides. Once a peptide is bound into the HLA peptide binding cleft, MHC class I HLA molecules interact with and stimulate CD8+ cytotoxic T cells. MHC class I has 3 main loci A, B, and C, with each loci divided into many alleles. Alleles refer to the DNA sequence of a gene at the given locus and is usually denoted by at least a four-digit number (e.g., A*24:02) the first letter designating the locus, a first number defining an allele group (or type) and the second number defining a specific protein within the allele group. A second and third number can be appended indicating silent coding variants and non-coding variants respectively.

[0004] Upon recognition of a specific peptide-HLA complex (pHLA), the T cell becomes activated and can (1) become cytotoxic, (2) secrete cytokines, and/or (3) recruit other immune cells. This complex interaction between a foreign or self-peptide, HLA molecule, and TCR is central to identifying how the immune system responds to recognized pathogens at the molecular level. One of the greatest difficulties in this complex interaction during an immune response is understanding the specificities of TCRs in terms of the identity of the peptides that are recognized. New methods of identifying TCRs and the pHLAs that they recognize are needed.

### SUMMARY

[0005] Provided herein in some embodiments are antigen screening libraries comprising a plurality of Human Leukocyte Antigen (HLA)-antigen polypeptide complexes, the HLA-antigen polypeptide complexes comprising (a) an HLA polypeptide, the HLA polypeptide comprising a peptide binding cleft, (b) a randomized antigen polypeptide comprising an amino acid sequence set forth in any one of SEQ ID NOs: 1 to 209, wherein the randomized antigen polypeptide specifically binds to the peptide binding cleft of the HLA polypeptide, and (c) a Beta-2 (β2) microglobulin polypeptide.

[0006] In some embodiments, the plurality of HLA-antigen complexes comprises an HLA polypeptide selected from the list consisting of A3, A11, A23, A24, A26, A30, A31, A33, A68, B7, B8, B15, B27, B40, B44, B51, B53, C1, C2, C3, C4, C5, C6, C7, C8, and E. In some embodiments, the plurality of HLA-antigen complexes comprises at least five, ten, fifteen, twenty, or twenty-five different HLA polypeptides selected from the list consisting of A3, A11, A23, A24, A26, A30, A31, A33, A68, B7, B8, B15, B27, B40, B44, B51, B53, C1, C2, C3, C4, C5, C6, C7, C8, and E. In some embodiments, the plurality of HLA-antigen complexes comprises all of A3, A11, A23, A24, A26, A30, A31, A33, A68, B7, B8, B15, B27, B40, B44, B51, B53, C1, C2, C3, C4, C5, C6, C7, C8, and E HLA polypeptides.

[0007] In some embodiments, the plurality of HLA-antigen complexes comprises an HLA polypeptide comprising an amino acid sequence at least 87.5%, 90%, 95%, 97%, 98%, 99%, or 100% identical to an amino acid sequence set forth in any one of SEQ ID NOs: 427 to 455.

[0008] In some embodiments, the plurality of the HLA-antigen polypeptide complexes comprises at least about 10⁵ different HLA-antigen polypeptide complexes comprising at least about 10⁵ different randomized antigen polypeptides.

[0009] In some embodiments, the HLA polypeptide, the randomized antigen polypeptide, and the β2-microglobulin polypeptide comprise a single polypeptide. In some embodiments, the single polypeptide further comprises a first flexible polypeptide linker and a second flexible polypeptide linker. In some embodiments, the randomized antigen polypeptide is N-terminal to the HLA polypeptide on the single polypeptide, and the HLA polypeptide is N-terminal to the β2-microglobulin polypeptide on the single polypeptide. In these embodiments, the first flexible polypeptide linker separates the HLA polypeptide from the randomized antigen polypeptide, and a second flexible polypeptide linker separates the HLA polypeptide from the β2-microglobulin polypeptide. In some embodiments, the randomized antigen polypeptide is C-terminal to the HLA polypeptide on the single polypeptide, and the HLA polypeptide is N-terminal to the β2-microglobulin polypeptide on the single polypeptide. In these embodiments, the first flexible polypeptide linker separates the HLA polypeptide from the randomized antigen polypeptide, and a second flexible polypeptide linker separates the HLA polypeptide from the β2-microglobulin polypeptide. In some embodiments, the randomized antigen polypeptide is N-terminal to the HLA polypeptide on the single polypeptide, and the HLA polypeptide is C-terminal to the β2-microglobulin polypeptide on the single polypeptide. In these embodiments, the first flexible polypeptide linker separates the randomized antigen polypeptide from the β2-microglobulin polypeptide, and a second flexible polypeptide linker separates the β2-microglobulin polypeptide from the HLA polypeptide. In some embodiments, the randomized antigen polypeptide is C-terminal to the HLA polypeptide on the single polypeptide, and the HLA polypeptide is C-terminal to the β2-microglobulin polypeptide on the single polypeptide. In these embodiments, the first flexible polypeptide linker separates the HLA polypeptide from the β2-microglobulin polypeptide, and a second flexible polypeptide linker separates the randomized antigen polypeptide from the HLA polypeptide. In some embodiments, the β2-microglobulin polypeptide is C-terminal to the HLA polypeptide on the single polypeptide, and the HLA polypeptide is N-terminal to the randomized antigen polypeptide on the single polypeptide. In these embodiments, the first flexible polypeptide linker separates the HLA polypeptide from the randomized antigen polypeptide, and a second flexible polypeptide linker separates the randomized antigen polypeptide from the β2-microglobulin polypeptide. In some embodiments, the randomized antigen polypeptide is C-terminal to the β2-microglobulin on the single polypeptide, and the HLA polypeptide is C-terminal to the randomized antigen polypeptide on the single polypeptide. In these embodiments, the first flexible polypeptide linker separates the β2-microglobulin polypeptide from the randomized antigen polypeptide, and a second flexible polypeptide linker separates the randomized antigen polypeptide from the HLA polypeptide.

[0010] In some embodiments, each of the HLA-antigen complexes of the plurality of the HLA-antigen complexes do not comprise an epitope tag. In some embodiments, at least one of the HLA-antigen complexes of the plurality of HLA-antigen complexes comprise an epitope tag. In some embodiments, at least one of the HLA-antigen complexes of the plurality of HLA-antigen complexes does not comprise an epitope tag and at least one of the HLA-antigen complexes of the plurality of HLA-antigen complexes does comprise an epitope tag. In some embodiments, the epitope tag comprises a FLAG tag, a c-MYC tag, a HIS-tag, a hemagglutinin (HA) tag, a VSVg tag, or a V5 tag.

[0011] In some embodiments, the HLA-antigen complexes each comprise a membrane tethering domain. In some embodiments, the membrane tethering domain comprises Aga2. In some embodiments, the antigen screening library is expressed on a plurality of cells.

[0012] In some embodiments, the plurality of cells are a plurality of yeast cells. In some embodiments, the plurality of yeast cells are a plurality of yeast cells of the EBY100 strain of Saccharomyces cerevisiae.

[0013] In some embodiments, each cell of the plurality of cells expresses a specific HLA-antigen complex.

[0014] Provided herein in some embodiments are antigen screening libraries comprising a plurality of Human Leukocyte Antigen (HLA)-antigen polypeptide complexes, the HLA-antigen polypeptide complexes comprising an HLA polypeptide, the HLA polypeptide comprising a peptide binding cleft, and a randomized antigen polypeptide comprising an amino acid sequence set forth in any one of SEQ ID NOs: 1 to 209, wherein the randomized antigen polypeptide specifically binds to the peptide binding cleft of the HLA polypeptide.

[0015] In some embodiments, the plurality of HLA-antigen complexes comprises an HLA polypeptide selected from the list consisting of A3, A11, A23, A24, A26, A30, A31, A33, A68, B7, B8, B15, B27, B40, B44, B51, B53, C1, C2, C3, C4, C5, C6, C7, C8, and E. In some embodiments, the plurality of HLA-antigen complexes comprises at least five, ten, fifteen, twenty, or twenty-five different HLA polypeptides selected from the list consisting of A3, A11, A23, A24, A26, A30, A31, A33, A68, B7, B8, B15, B27, B40, B44, B51, B53, C1, C2, C3, C4, C5, C6, C7, C8, and E. In some embodiments, the plurality of HLA-antigen complexes comprises all of A3, A11, A23, A24, A26, A30, A31, A33, A68, B7, B8, B15, B27, B40, B44, B51, B53, C1, C2, C3, C4, C5, C6, C7, C8, and E HLA polypeptides.

[0016] In some embodiments, the plurality of HLA-antigen complexes comprises an HLA polypeptide comprising an amino acid sequence at least 87.5%, 90%, 95%, 97%, 98%, 99%, or 100% identical to an amino acid sequence set forth in any one of SEQ ID NOs: 427 to 455.

[0017] In some embodiments, the plurality of the HLA-antigen polypeptide complexes comprises at least about 10⁵ different HLA-antigen polypeptide complexes comprising at least about 10⁵ different randomized antigen polypeptides.

[0018] In some embodiments, the HLA polypeptide, the randomized antigen polypeptide, and the β2-microglobulin polypeptide comprise a single polypeptide. In some embodiments, the single polypeptide further comprises a first flexible polypeptide linker separating the HLA polypeptide from the randomized antigen polypeptide. In certain of these embodiments, the randomized antigen polypeptide is N-terminal to the HLA polypeptide on the single polypeptide. In certain of these embodiments, the randomized antigen polypeptide is C-terminal to the HLA polypeptide on the single polypeptide.

[0019] In some embodiments, each of the HLA-antigen complexes of the plurality of the HLA-antigen complexes do not comprise an epitope tag. In some embodiments, at least one of the HLA-antigen complexes of the plurality of HLA-antigen complexes comprise an epitope tag. In some embodiments, at least one of the HLA-antigen complexes of the plurality of HLA-antigen complexes does not comprise an epitope tag and at least one of the HLA-antigen complexes of the plurality of HLA-antigen complexes does comprise an epitope tag. In some embodiments, the epitope tag comprises a FLAG tag, a c-MYC tag, a HIS-tag, a hemagglutinin (HA) tag, a VSVg tag, or a V5 tag.

[0020] In some embodiments, the HLA-antigen complexes each comprise a membrane tethering domain. In some embodiments, the membrane tethering domain comprises Aga2. In some embodiments, the antigen screening library is expressed on a plurality of cells.

[0021] In some embodiments, the plurality of cells are a plurality of yeast cells. In some embodiments, the plurality of yeast cells are a plurality of yeast cells of the EBY100 strain of Saccharomyces cerevisiae.

[0022] In some embodiments, each cell of the plurality of cells expresses a specific HLA-antigen complex.

[0023] Provided herein in some embodiments are antigen screening libraries comprising a plurality of antigen polypeptide-Beta-2 (β2) microglobulin polypeptide complexes, the antigen polypeptide-Beta-2 (β2) microglobulin polypeptide complexes. In these embodiments, the antigen screening libraries further comprise a randomized antigen polypeptide comprising an amino acid sequence set forth in any one of SEQ ID NOs: 1 to 209, wherein the randomized antigen polypeptide specifically binds to the peptide binding cleft of the HLA polypeptide; and a Beta-2 (β2) microglobulin polypeptide. In these embodiments, the antigen screening libraries also further comprise a plurality of HLA polypeptides constitutively expressed by one or more yeast cells and comprising a peptide binding cleft.

[0024] In some embodiments, the plurality of HLA-antigen complexes comprises an HLA polypeptide selected from the list consisting of A3, A11, A23, A24, A26, A30, A31, A33, A68, B7, B8, B15, B27, B40, B44, B51, B53, C1, C2, C3, C4, C5, C6, C7, C8, and E. In some embodiments, the plurality of HLA-antigen complexes comprises at least five, ten, fifteen, twenty, or twenty-five different HLA polypeptides selected from the list consisting of A3, A11, A23, A24, A26, A30, A31, A33, A68, B7, B8, B15, B27, B40, B44, B51, B53, C1, C2, C3, C4, C5, C6, C7, C8, and E. In some embodiments, the plurality of HLA-antigen complexes comprises all of A3, A11, A23, A24, A26, A30, A31, A33, A68, B7, B8, B15, B27, B40, B44, B51, B53, C1, C2, C3, C4, C5, C6, C7, C8, and E HLA polypeptides.

[0025] In some embodiments, the plurality of HLA-antigen complexes comprises an HLA polypeptide comprising an amino acid sequence at least 87.5%, 90%, 95%, 97%, 98%, 99%, or 100% identical to an amino acid sequence set forth in any one of SEQ ID NOs: 427 to 455.

[0026] In some embodiments, the plurality of the antigen polypeptide-Beta-2 (β2) microglobulin polypeptide complexes comprises at least about 10⁵ different antigen polypeptide-Beta-2 (β2) microglobulin polypeptide complexes comprising at least about 10⁵ different randomized antigen polypeptides.

[0027] In some embodiments, the randomized antigen polypeptide and the β2-microglobulin polypeptide comprise a single polypeptide. In some embodiments, the single polypeptide further comprises a first flexible polypeptide linker. In certain of these embodiments, the randomized antigen polypeptide is N-terminal to the β2-microglobulin polypeptide on the single polypeptide. In certain of these embodiments, the randomized antigen polypeptide is C-terminal to the β2-microglobulin polypeptide on the single polypeptide.

[0028] In some embodiments, each of the antigen polypeptide-Beta-2 (β2) microglobulin polypeptide complexes of the plurality of the antigen polypeptide-Beta-2 (β2) microglobulin polypeptide complexes do not comprise an epitope tag. In some embodiments, at least one of the antigen polypeptide-Beta-2 (β2) microglobulin polypeptide complexes of the plurality of antigen polypeptide-Beta-2 (β2) microglobulin polypeptide complexes comprise an epitope tag. In some embodiments, at least one of the HLA-antigen complexes of the plurality of HLA-antigen complexes does not comprise an epitope tag and at least one of the HLA-antigen complexes of the plurality of HLA-antigen complexes does comprise an epitope tag. In some embodiments, the epitope tag comprises a FLAG tag, a c-MYC tag, a HIS-tag, a hemagglutinin (HA) tag, a VSVg tag, or a V5 tag.

[0029] In some embodiments, the antigen polypeptide-Beta-2 (β2) microglobulin polypeptide complexes each comprise a membrane tethering domain. In some embodiments, the membrane tethering domain comprises Aga2. In some embodiments, the antigen screening library is expressed on a plurality of cells.

[0030] In some embodiments, the plurality of cells are a plurality of yeast cells. In some embodiments, the plurality of yeast cells are a plurality of yeast cells of the EBY100 strain of Saccharomyces cerevisiae.

[0031] In some embodiments, each cell of the plurality of cells expresses a specific antigen polypeptide-Beta-2 (β2) microglobulin polypeptide complex.

[0032] Provided herein in some embodiments are a plurality of nucleic acids encoding the antigen screening libraries in accordance with the present technology.

[0033] In some embodiments, the HLA polypeptide of the HLA-antigen complex is encoded by a nucleic acid that is at least about 85%, 87.5%, 90%, 95%, 97%, 98%, or 99% homologous to any one of SEQ ID NOs: 456 to 484. In some embodiments, the randomized antigen polypeptide of the HLA-antigen complex is encoded by a nucleic acid set forth in any one of SEQ ID NOs: 210 to 426.

[0034] In some embodiments, the plurality of nucleic acids is expressed by a plurality of cells.

[0035] Provided herein in some embodiments are a plurality of cells expressing the antigen screening library in accordance with the present technology.

[0036] In some embodiments, the plurality of cells is a plurality of yeast cells. In some embodiments, the plurality of yeast cells is a plurality of cells of the EBY100 strain of Saccharomyces cerevisiae. In some embodiments, each cell of the plurality of cells comprises a nucleic acid of the plurality of nucleic acids encoding a specific of HLA-antigen complex.

[0037] Provided herein in some embodiments are methods of selecting an antigen comprising contacting the plurality of cells in accordance with the present technology with a T cell receptor (TCR).

[0038] In some embodiments, the TCR is immobilized on a substrate. In some embodiments, the TCR is expressed by a cell.

[0039] In some embodiments, the selection is repeated for 2, 3, 4, or 5 cycles.

[0040] In some embodiments, the antigen is a polypeptide antigen. In some embodiments, the antigen is a polypeptide antigen that does not naturally occur. In some embodiments, the antigen is a polypeptide antigen that does not naturally occur in a human.

### BRIEF DESCRIPTION OF THE DRAWINGS

[0041] FIG. 1A illustrates a schematic of an HLA antigen polypeptide construct coupled to a yeast cell in accordance with some embodiments of the present technology.

[0042] FIG. 1B illustrates an exemplary, non-limiting, embodiment of an HLA antigen polypeptide construct tethered to a cell in accordance with some embodiments of the present technology.

[0043] FIG. 2 illustrates an exemplary, non-limiting, depiction of a process for selecting a specific randomized antigen polypeptide that interacts with a specific T cell receptor in accordance with some embodiments of the present technology.

[0044] FIGS. 3A and 3B are maps of an example pCT vector (FIG. 3A) and an example pYAL vector (FIG. 3B).

[0045] FIG. 4 illustrates characterization by flow cytometry of peptide-HLA (pHLA) expression on yeast surface for a plurality of allotypes in accordance with some embodiments of the present technology.

### DETAILED DESCRIPTION

[0046] Described herein are antigen screening libraries useful for selection and/or identification of polypeptide ligands for T cell receptors (TCRs). In many cases, the antigen screening libraries are useful to discover polypeptide antigens that are capable of interacting with and stimulating human T cells as TCR ligands, including both endogenous TCR antigens and non-endogenous TCR antigens which may be novel TCR antigens and/or novel epitopes. Such novel antigens and/or novel epitopes are useful, at least for example, to stimulate one or more TCRs on T cells that may have become exhausted or anergized, and revive immune responses against cancer, tumors, or chronic viral infections. Accordingly, the present disclosure includes peptide library display, such as randomized peptide antigen libraries, in the context of a given HLA to determine the specificities and general recognition properties of TCRs restricted to HLA-mediated peptide recognition.

[0047] Once expressed using the methodologies described herein, a randomized peptide antigen library may be displayed by HLA molecules that are expressed on the surface of cells. In general, the cells that display these HLA-antigen polypeptide complexes are not normal antigen presenting cells of a host's immune system but rather are cells that can easily be transformed, transfected, transduced, and/or electroporated with a nucleic acid encoding an HLA-antigen polypeptide, including without limitation, insect cells, yeast cells, and bacterial cells. In some embodiments, the randomized peptide antigen library is expressed by yeast cells. A mixture of plasmids that encode at least 10⁴, 10⁵, 10⁶, 10⁷, 10⁸, 10⁹, 10¹⁰, 10¹¹, 10¹², 10¹³, 10¹⁴, or 10¹⁵ distinct polypeptide antigens, and either one or a plurality of different HLA molecules, are transformed into yeast cells. Following transformation with the randomized peptide antigen library, the yeast cells that express the HLA-antigen polypeptide complex library are then contacted by a TCR, or other macromolecule having one or more antigen binding domains, serving as a bait. The TCRs are either (1) expressed by a cell or (2) recombinantly produced and, optionally, multimerized and/or immobilized, on a solid structure, such as a bead, or via a protein scaffold such as streptavidin or streptavidin conjugated dextran (referenced as the selection reagent). The cells expressing HLA-antigen polypeptide complexes that interact with the TCR selection reagent can be selected by an appropriate modality, and after 2, 3, 4, 5, 6, 7 or more rounds of enrichment (e.g., cycles) the nucleic acids encoding the HLA-antigen polypeptide complexes can be extracted from the enriched cells and sequencing can be performed to determine the polypeptide antigens that have been enriched. The enriched polypeptide antigens define the structural attributes that interact with a given TCR.

[0048] In some embodiments, the present disclosure includes an antigen screening library which comprises a plurality of HLA-antigen polypeptide complexes. In some embodiments, the HLA-antigen polypeptide complexes comprise (a) an HLA polypeptide, the HLA polypeptide comprising a peptide binding cleft; (b) a randomized antigen polypeptide comprising an amino acid sequence set forth in any one of SEQ ID NOs: 1 to 194, wherein the randomized antigen polypeptide is selected to specifically bind to the peptide binding cleft of the HLA polypeptide; and (c) a beta-2 (β2) microglobulin polypeptide. Also provided herein are derivatives of randomized peptide antigens and libraries thereof, compositions thereof, pharmaceutical compositions thereof, and uses of the same. Also provided herein are nucleic acid sequences encoding one or more randomized peptide antigen libraries disclosed herein and derivatives thereof, and methods for expressing the one or more randomized peptide antigen libraries, peptides thereof, and derivatives thereof in one or more cells.

[0049] As set forth in the examples provided herein, a randomized peptide antigen library was designed (Example 1) and includes nucleic acid constructs (FIG. 1A) and peptide constructs tethered to a cell, such as a yeast cell (FIG. 1B). Expression of pHLA was characterized and validated using a yeast display (YD) system (Example 2). These pHLAs can interact with a TCR and determining whether interaction occurs can be determined with one or more processes described herein, such as was performed using the process illustrated in FIG. 2. Expression of pHLA was validated by flow cytometry (Example 2, Level 1) and can further be functionally validated by screening the randomized peptide antigen library using a candidate allotype-matched TCR (Example 2, Level 2).

[0050] The following description of the invention is merely intended to illustrate various embodiments of the present disclosure. As such, the specific modifications discussed are not to be construed as limitations on the scope of the present disclosure. It will be apparent to one skilled in the art that various equivalents, changes, and modifications may be made without departing from the scope of the present disclosure, and it is understood that such equivalent embodiments are to be included herein.

[0051] All references listed herein are incorporated by reference, in their entirety. Methods and apparatuses are provided here by way of example and are not intended to be limiting to the present disclosure.

### Certain Definitions

[0052] In the following description, some specific details are set forth in order to provide a thorough understanding of various embodiments. However, one skilled in the art will understand that the embodiments provided may be practiced without these details. Unless the context requires otherwise, throughout the specification and claims which follow, the word “comprise” and variations thereof, such as, “comprises” and “comprising” are to be construed in an open, inclusive sense, that is, as “including, but not limited to.” As used in this specification and the appended claims, the singular forms “a,” “an,” and “the” include plural referents unless the content clearly dictates otherwise. It should also be noted that the term “or” is generally employed in its sense including “and/or” unless the content clearly dictates otherwise. Further, headings provided herein are for convenience only and do not interpret the scope or meaning of the claimed embodiments.

[0053] The terms “peptide,” “polypeptide,” and “protein” are used interchangeably to refer to a polymer of amino acid residues, and are not limited to a minimum length, though a number of amino acid residues may be specified (e.g., 9mer is nine amino acid residues). Polypeptides may include amino acid residues including natural and/or non-natural amino acid residues. The terms also include post-expression modifications of the polypeptide, for example, glycosylation, sialylation, acetylation, phosphorylation, and the like. In some embodiments, the polypeptides may contain modifications with respect to a native or natural sequence, as long as the protein maintains the desired activity. These modifications may be deliberate, as through site-directed mutagenesis, or may be accidental, such as through mutations of hosts which produce the proteins or errors due to PCR amplification.

[0054] The term “acidic residue” refers to amino acid residues in D- or L-form having sidechains comprising acidic groups. Exemplary acidic residues include D and E.

[0055] The term “amide residue” refers to amino acids in D- or L-form having sidechains comprising amide derivatives of acidic groups. Exemplary residues include N and Q.

[0056] The term “aromatic residue” refers to amino acid residues in D- or L-form having sidechains comprising aromatic groups. Exemplary aromatic residues include F, Y, and W.

[0057] The term “basic residue” refers to amino acid residues in D- or L-form having sidechains comprising basic groups. Exemplary basic residues include H, K, and R.

[0058] The term “hydrophilic residue” refers to amino acid residues in D- or L-form having sidechains comprising polar groups. Exemplary hydrophilic residues include C, S, T, N, and Q.

[0059] The term “nonfunctional residue” refers to amino acid residues in D- or L-form having sidechains that lack acidic, basic, or aromatic groups. Exemplary nonfunctional amino acid residues include M, G, A, V, I, L and norleucine (Nle).

[0060] The term “neutral hydrophobic residue” refers to amino acid residues in D- or L-form having sidechains that lack basic, acidic, or polar groups. Exemplary neutral hydrophobic amino acid residues include A, V, L, I, P, W, M, and F.

[0061] The term “polar hydrophobic residue” refers to amino acid residues in D- or L-form having sidechains comprising polar groups. Exemplary polar hydrophobic amino acid residues include T, G, S, Y, C, Q, and N.

[0062] The term “hydrophobic residue” refers to amino acid residues in D- or L-form having sidechains that lack basic or acidic groups. Exemplary hydrophobic amino acid residues include A, V, L, I, P, W, M, F, T, G, S, Y, C, Q, and N.

[0063] “Percent (%) sequence identity” with respect to a reference polypeptide sequence is the percentage of amino acid residues in a candidate sequence that is identical with the amino acid residues in the reference polypeptide sequence, after aligning the sequences and introducing gaps, if necessary, to achieve the maximum percent sequence identity, and not considering any conservative substitutions as part of the sequence identity. Alignment for purposes of determining percent amino acid sequence identity can be achieved in various ways that are known, for instance, using publicly available computer software such as BLAST, BLAST-2, ALIGN or Megalign (DNASTAR) software, or other software appropriate for nucleic acid sequences. Appropriate parameters for aligning sequences are able to be determined, including algorithms needed to achieve maximal alignment over the full length of the sequences being compared. For purposes herein, however, % amino acid sequence identity values are generated using the sequence comparison computer program ALIGN-2. The ALIGN-2 sequence comparison computer program was authored by Genentech, Inc., and the source code has been filed with user documentation in the U.S. Copyright Office, Washington D.C., 20559, where it is registered under U.S. Copyright Registration No. TXU510087. The ALIGN-2 program is publicly available from Genentech, Inc., South San Francisco, Calif., or may be compiled from the source code. The ALIGN-2 program should be compiled for use on a UNIX operating system, including digital UNIX V4.0D. All sequence comparison parameters are set by the ALIGN-2 program and do not vary.

[0064] In situations where ALIGN-2 is employed for amino acid sequence comparisons, the % amino acid sequence identity of a given amino acid sequence A to, with, or against a given amino acid sequence B (which can alternatively be phrased as a given amino acid sequence A that has or comprises a some % amino acid sequence identity to, with, or against a given amino acid sequence B) is calculated as follows: 100 times the fraction X/Y, where X is the number of amino acid residues scored as identical matches by the sequence alignment program ALIGN-2 in that program's alignment of A and B, and where Y is the total number of amino acid residues in B. It will be appreciated that where the length of amino acid sequence A is not equal to the length of amino acid sequence B, the % amino acid sequence identity of A to B will not equal the % amino acid sequence identity of B to A. Unless specifically stated otherwise, all % amino acid sequence identity values used herein are obtained as described in the immediately preceding paragraph using the ALIGN-2 computer program.

[0065] As used herein, the terms “homologous,” “homology,” or “percent homology” when used herein to describe to a nucleic acid sequence, relative to a reference sequence, can be determined using the formula described by Karlin & Altschul 1990, modified as in Karlin & Altschul 1993. Such a formula is incorporated into the basic local alignment search tool (BLAST) programs of Altschul 1990. Percent homology of sequences can be determined using the most recent version of BLAST, as of the filing date of this application.

[0066] “T cell receptor” (TCR), refers to an antigen/MHC binding heterodimeric protein product of a vertebrate, e.g. mammalian, TCR gene complex, including the human TCR α, β, γ and δ chains. For example, the complete sequence of the human (3 TCR locus has been sequenced, as published by Rowen 1996; the human TCR locus has been sequenced and resequenced, for example see Mackelprang 2006; see a general analysis of the T-cell receptor variable gene segment families in Arden 1995; each of which is herein specifically incorporated by reference for the sequence information provided and referenced in the publication.

[0067] “Bait” refers to a TCR or “other macromolecule having one or more antigen binding domains” that binds to an antigen of the present technology. The other macromolecule having one or more antigen binding domains is an antibody, a DARPin, or a synthetic molecule, including aptamers. The antigen binding domain binds a peptide, such as one or more of the HLA-peptide complexes of the present technology, or a nucleic acid, such as DNA and RNA.

[0068] “Exogenous” with respect to a nucleic acid or polynucleotide indicates that the nucleic acid is part of a recombinant nucleic acid construct or is not in its natural environment. For example, an exogenous nucleic acid can be a sequence from one species introduced into another species, i.e., a heterologous nucleic acid. Typically, such an exogenous nucleic acid is introduced into the other species via a recombinant nucleic acid construct. An exogenous nucleic acid also can be a sequence that is native to an organism and that has been reintroduced into cells of that organism. An exogenous nucleic acid that includes a native sequence can often be distinguished from the naturally occurring sequence by the presence of non-natural sequences linked to the exogenous nucleic acid, e.g., nonnative regulatory sequences flanking a native sequence in a recombinant nucleic acid construct. In addition, stably transformed exogenous nucleic acids typically are integrated at positions other than the position where the native sequence is found. The exogenous elements may be added to a construct, for example, using genetic recombination. Genetic recombination is the breaking and rejoining of DNA strands to form new molecules of DNA encoding a novel set of genetic information.

[0069] As used herein the term “about” refers to an amount that is near the stated amount by 10%.

### Structural Characteristics of the HLA-Antigen Polypeptide Complexes

[0070] Disclosed herein are antigen screening libraries, such as randomized peptide antigen libraries, which include a plurality of HLA-antigen polypeptide complexes. The HLA-antigen polypeptide complexes of the current disclosure minimally comprise at least three constituents: (a) a randomized antigen polypeptide, (b) a major histocompatibility class I (MHC I) HLA molecule, and (c) a β2-microglobulin. In some embodiments, the randomized antigen polypeptide of (a) is randomized having at least one or more residues conserved that serve as anchor residues to bind to an HLA molecule of a specific type. Exemplary, but not limiting, randomized antigen polypeptide antigens and the HLA type with which they associate are shown in Table 1 and given by SEQ ID NOs: 1 to 194 and Table 2 and given by SEQ ID NOs: 195 to 209. In some embodiments, the randomized polypeptide antigens comprises a sequence that is at least about 70%, 75%, 80%, 85%, 87%, 87.5%, 90%, 95%, 97%, 97.5%, 98%, 98.5%, 99%, 99.5%, or 100% identical to any one of, but not limited to, the amino acid sequences set forth in any one of SEQ ID NOs: 1 to 194 and SEQ ID NOs: 195 to 209. In some embodiments, the randomized polypeptide antigens comprise a sequence identical to any one of those set forth in any one of SEQ ID NOs: 1 to 194 and SEQ ID NOs: 195 to 209. Also envisioned within the present disclosure are randomized polypeptide antigen truncations that have 1, 2, 3, 4, 5, 6, 7, 8, 9, 10, 15, 20, or 25 amino acids truncated from the N-terminus or truncated from the C-terminus of any one of SEQ ID NOs: 1 to 194 and SEQ ID NOs: 195 to 209. In some embodiments, the HLA molecule of (b) is a HLA polypeptide and comprises a peptide binding cleft. Once expressed, in some embodiments, the randomized antigen polypeptide of (a) binds the HLA polypeptide of (b) at the peptide binding cleft.

TABLE 1
Polypeptide Antigen Sequences Sorted By HLA Type

| HLA type | SEQ ID NO: | Sequence |
|---|---|---|
| HLA A3 | 1 | X(V/L/M)XXXXXK |
| | 2 | X(V/L/M)XXXXXXK |
| | 3 | X(V/L/M)XXXXXXXK |
| | 4 | X(V/L/M)XXXXXXXXK |
| | 5 | X(V/L/M)XXXXXXXXXK |
| HLA A11 | 6 | X(V/L/F)XXXXX(K/R) |
| | 7 | X(V/L/F)XXXXXX(K/R) |
| | 8 | X(V/L/F)XXXXXXX(K/R) |
| | 9 | X(V/L/F)XXXXXXXX(K/R) |
| | 10 | X(V/L/F)XXXXXXXXX(K/R) |
| HLA A23 | 11 | XXXXXXXY |
| | 12 | XXXXXXXXY |
| | 13 | XXXXXXXXXY |
| | 14 | XXXXXXXXXXY |
| | 15 | XXXXXXXXXXXY |
| HLA A24 | 16 | X(F/Y)XXXXX(I/L/F) |
| | 17 | X(F/Y)XXXXXX(I/L/F) |
| | 18 | X(F/Y)XXXXXXX(I/L/F) |
| | 19 | X(F/Y)XXXXXXXX(I/L/F) |
| | 20 | X(F/Y)XXXXXXXXX(I/L/F) |
| HLA A26 | 21 | X(V/L/F)XXXXX(F/Y) |
| | 22 | X(I/T)XXXXX(F/Y) |
| | 23 | X(V/L/F)XXXXXX(F/Y) |
| | 24 | X(I/T)XXXXXX(F/Y) |
| | 25 | X(V/L/F)XXXXXXX(F/Y) |
| | 26 | X(I/T)XXXXXXX(F/Y) |
| | 27 | X(V/L/F)XXXXXXXX(F/Y) |
| | 28 | X(I/T)XXXXXXXX(F/Y) |
| | 29 | X(V/L/F)XXXXXXXXX(F/Y) |
| | 30 | X(I/T)XXXXXXXXX(F/Y) |
| HLA A30 | 31 | X(F/Y)XXXXX(L) |
| | 32 | X(F/Y)XXXXXX(L) |
| | 33 | X(F/Y)XXXXXXX(L) |
| | 34 | X(F/Y)XXXXXXXX(L) |
| | 35 | X(F/Y)XXXXXXXXX(L) |
| HLA A31 | 36 | XXXXXXX(K/R) |
| | 37 | XXXXXXXX(K/R) |
| | 38 | XXXXXXXXX(K/R) |
| | 39 | XXXXXXXXXX(K/R) |
| | 40 | XXXXXXXXXXX(K/R) |
| HLA A33 | 41 | XXXXXXX(K/R) |
| | 42 | XXXXXXXX(K/R) |
| | 43 | XXXXXXXXX(K/R) |
| | 44 | XXXXXXXXXX(K/R) |
| | 45 | XXXXXXXXXXX(K/R) |
| HLA A68 | 46 | X(V)XXXXX(K/R) |
| | 47 | X(V)XXXXXX(K/R) |
| | 48 | X(V)XXXXXXX(K/R) |
| | 49 | X(V)XXXXXXXX(K/R) |
| | 50 | X(V)XXXXXXXXX(K/R) |
| | 51 | X(T)XXXXX(K/R) |
| | 52 | X(T)XXXXXX(K/R) |
| | 53 | X(T)XXXXXXX(K/R) |
| | 54 | X(T)XXXXXXXX(K/R) |
| | 55 | X(T)XXXXXXXXX(K/R) |
| HLA B7 | 56 | XPXXXXXL |
| | 57 | XPXXXXXXL |
| | 58 | XPXXXXXXXL |
| | 59 | XPXXXXXXXXL |
| | 60 | XPXXXXXXXXXL |
| HLA B8 | 61 | XX(K)X(K/R)XX(L) |
| | 62 | XX(K)X(K/R)XXX(L) |
| | 63 | XX(K)X(K/R)XXXX(L) |
| | 64 | XX(K)X(K/R)XXXXX(L) |
| | 65 | XX(K)X(K/R)XXXXXX(L) |
| HLA B15 | 66 | X(Q/L)XXXXX(F/Y) |
| | 67 | X(Q/L)XXXXXX(F/Y) |
| | 68 | X(Q/L)XXXXXXX(F/Y) |
| | 69 | X(Q/L)XXXXXXXX(F/Y) |
| | 70 | X(Q/L)XXXXXXXXX(F/Y) |
| HLA B27 | 71 | X(R)XXXXX(F/Y) |
| | 72 | X(R)XXXXXX(F/Y) |
| | 73 | X(R)XXXXXXX(F/Y) |
| | 74 | X(R)XXXXXXXX(F/Y) |
| | 75 | X(R)XXXXXXXXX(F/Y) |
| HLA B35 | 76 | X(P)XXXXX(F/Y) |
| | 77 | X(P)XXXXXX(F/Y) |
| | 78 | X(P)XXXXXXX(F/Y) |
| | 79 | X(P)XXXXXXXX(F/Y) |
| | 80 | X(P)XXXXXXXXX(F/Y) |
| | 81 | X(P)XXXXX(M/L/I) |
| | 82 | X(P)XXXXXX(M/L/I) |
| | 83 | X(P)XXXXXXX(M/L/I) |
| | 84 | X(P)XXXXXXXX(M/L/I) |
| | 85 | X(P)XXXXXXXXX(M/L/I) |
| HLA B40 | 86 | X(E)XXXXX(L) |
| | 87 | X(E)XXXXXX(L) |
| | 88 | X(E)XXXXXXX(L) |
| | 89 | X(E)XXXXXXXX(L) |
| | 90 | X(E)XXXXXXXXX(L) |
| HLA B51 | 91 | X(A/G)XXXXX(V/I) |
| | 92 | X(A/G)XXXXXX(V/I) |
| | 93 | X(A/G)XXXXXXX(V/I) |
| | 94 | X(A/G)XXXXXXXX(V/I) |
| | 95 | X(A/G)XXXXXXXXX(V/I) |
| | 96 | X(P)XXXXX(V/I) |
| | 97 | X(P)XXXXXX(V/I) |
| | 98 | X(P)XXXXXXX(V/I) |
| | 99 | X(P)XXXXXXXX(V/I) |
| | 100 | X(P)XXXXXXXXX(V/I) |
| HLA B44 | 101 | X(E)XXXXX(F/Y) |
| | 102 | X(E)XXXXXX(F/Y) |
| | 103 | X(E)XXXXXXX(F/Y) |
| | 104 | X(E)XXXXXXXX(F/Y) |
| | 105 | X(E)XXXXXXXXX(F/Y) |
| HLA B53 | 106 | X(P)XXXXX(W) |
| | 107 | X(P)XXXXXX(W) |
| | 108 | X(P)XXXXXXX(W) |
| | 109 | X(P)XXXXXXXX(W) |
| | 110 | X(P)XXXXXXXXX(W) |
| | 111 | X(P)XXXXX(F/L) |
| | 112 | X(P)XXXXXX(F/L) |
| | 113 | X(P)XXXXXXX(F/L) |
| | 114 | X(P)XXXXXXXX(F/L) |
| | 115 | X(P)XXXXXXXXX(F/L) |
| HLA B57 | 116 | X(A/T/S)XXXXX(F/Y) |
| | 117 | X(A/T/S)XXXXXX(F/Y) |
| | 118 | X(A/T/S)XXXXXXX(F/Y) |
| | 119 | X(A/T/S)XXXXXXXX(F/Y) |
| | 120 | X(A/T/S)XXXXXXXXX(F/Y) |
| | 121 | X(A/T/S)XXXXX(W) |
| | 122 | X(A/T/S)XXXXXX(W) |
| | 123 | X(A/T/S)XXXXXXX(W) |
| | 124 | X(A/T/S)XXXXXXXX(W) |
| | 125 | X(A/T/S)XXXXXXXXX(W) |
| HLA C1 | 126 | X(L)XXXXX(L) |
| | 127 | X(L)XXXXXX(L) |
| | 128 | X(L)XXXXXXX(L) |
| | 129 | X(L)XXXXXXXX(L) |
| | 130 | X(L)XXXXXXXXX(L) |
| | 131 | X(A)XXXXXXX(L) |
| | 132 | X(A)XXXXXX(L) |
| | 133 | X(A)XXXXXXX(L) |
| | 134 | X(A)XXXXXXXX(L) |
| | 135 | X(A)XXXXXXXXX(L) |
| HLA C2 | 136 | X(A)XXXXX(L/V) |
| | 137 | X(A)XXXXXX(L/V) |
| | 138 | X(A)XXXXXXX(LN) |
| | 139 | X(A)XXXXXXXX(L/V) |
| | 140 | X(A)XXXXXXXXX(L/V) |
| | 141 | X(A)XXXXX(F/Y) |
| | 142 | X(A)XXXXXX(F/Y) |
| | 143 | X(A)XXXXXXX(F/Y) |
| | 144 | X(A)XXXXXXXX(F/Y) |
| | 145 | X(A)XXXXXXXXX(F/Y) |
| HLA C3 | 146 | XXXXXXX(L/F/M/I) |
| | 147 | XXXXXXXX(L/F/M/I) |
| | 148 | XXXXXXXXX(L/F/M/I) |
| | 149 | XXXXXXXXXX(L/F/M/I) |
| | 150 | XXXXXXXXXXX(L/F/M/I) |
| HLA C4 | 151 | X(Y/F)XXXXX(L/F/M/I) |
| | 152 | X(Y/F)XXXXXX(L/F/M/I) |
| | 153 | X(Y/F)XXXXXXX(L/F/M/I) |
| | 154 | X(Y/F)XXXXXXXX(L/F/M/I) |
| | 155 | X(Y/F)XXXXXXXXX(L/F/M/I) |
| | 156 | X(P)XXXXX(L/F/M/I) |
| | 157 | X(P)XXXXXX(L/F/M/I) |
| | 158 | X(P)XXXXXXX(L/F/M/I) |
| | 159 | X(P)XXXXXXXX(L/F/M/I) |
| | 160 | X(P)XXXXXXXXX(L/F/M/I) |
| HLA C5 | 161 | XX(D)XXXX(L/V) |
| | 162 | XX(D)XXXXX(L/V) |
| | 163 | XX(D)XXXXXX(LN) |
| | 164 | XX(D)XXXXXXX(L/V) |
| | 165 | XX(D)XXXXXXXX(L/V) |
| HLA C6 | 166 | XXXXXXX(L/V/I) |
| | 167 | XXXXXXXX(L/V/I) |
| | 168 | XXXXXXXXX(L/V/I) |
| | 169 | XXXXXXXXXX(L/V/I) |
| | 170 | XXXXXXXXXXX(L/V/I) |
| | 171 | XXXXXXX(Y) |
| | 172 | XXXXXXXX(Y) |
| | 173 | XXXXXXXXX(Y) |
| | 174 | XXXXXXXXXX(Y) |
| | 175 | XXXXXXXXXXX(Y) |
| HLA C7 | 176 | XXXXXXX(F/L) |
| | 177 | XXXXXXXX(F/L) |
| | 178 | XXXXXXXXX(F/L) |
| | 179 | XXXXXXXXXX(F/L) |
| | 180 | XXXXXXXXXXX(F/L) |
| | 181 | XXXXXXX(Y) |
| | 182 | XXXXXXXX(Y) |
| | 183 | XXXXXXXXX(Y) |
| | 184 | XXXXXXXXXX(Y) |
| | 185 | XXXXXXXXXXX(Y) |
| HLA C8 | 186 | XX(D)XXX(L) |
| | 187 | XX(D)XXXX(L) |
| | 188 | XX(D)XXXXX(L) |
| | 189 | XX(D)XXXXXX(L) |
| | 190 | XX(D)XXXXXXX(L) |
| HLA E | 191 | X(L/M)XXXXX(L/V) |
| | 192 | X(L/M)XXXXXX(LN) |
| | 193 | X(L/M)XXXXXXX(LN) |
| | 194 | X(L/M)XXXXXXXX(L/V) |

TABLE 2
Additional Polypeptide Antigen
Sequences for HLA A11

| SEQ ID NO: | Sequence |
|---|---|
| 195 | X(I/L/V)XXXXX(K/R) |
| 196 | X(I/L/V)XXXXXX(K/R) |
| 197 | X(I/L/V)XXXXXXX(K/R) |
| 198 | X(I/L/V)XXXXXXXX(K/R) |
| 199 | X(I/L/V)XXXXXXXXX(K/R) |
| 200 | X(Y/F)XXXXX(K/R) |
| 201 | X(Y/F)XXXXXX(K/R) |
| 202 | X(Y/F)XXXXXXX(K/R) |
| 203 | X(Y/F)XXXXXXXX(K/R) |
| 204 | X(Y/F)XXXXXXXXX(K/R) |
| 205 | X(N/Y)XXXXX(K/R) |
| 206 | X(N/Y)XXXXXX(K/R) |
| 207 | X(N/Y)XXXXXXX(K/R) |
| 208 | X(N/Y)XXXXXXXX(K/R) |
| 209 | X(N/Y)XXXXXXXXX(K/R) |

[0071] In some embodiments, antigen screening libraries of the present disclosure include (b) randomized antigen polypeptides encoded at least by, but not limited to, nucleotide sequences SEQ ID NOs: 210 to 411 provided at least in Table 4. In some embodiments, antigen screening libraries of the present disclosure include (b) randomized antigen polypeptides encoded at least by, but not limited to, nucleotide sequences SEQ ID NOs: 412 to 426 provided at least in Table 5. Nucleic acids that encode the randomized antigen polypeptides of (b) are encoded by a degenerate base sequence, effectively allowing any amino acid to be encoded at a given position corresponding to the degenerate base sequence. Each randomized antigen polypeptide has at least one conserved anchor position that is encoded by a restricted degenerate code, or a specific sequence, which allows the randomized antigen polypeptide to more efficiently interact with a certain HLA type. Having at least one conserved anchor position per randomized antigen polypeptide increases efficiency of formation of a randomized antigen polypeptide and HLA complex compared to formation of an HLA complex with a fully randomized antigen polypeptide. In some embodiments, 1, 2, or 3 of the amino acid residues of a randomized antigen polypeptide are constant. In some embodiments, the randomized antigen polypeptide antigens comprises a sequence that is at least about 70%, 75%, 80%, 85%, 87%, 87.5%, 90%, 95%, 97%, 97.5%, 98%, 98.5%, 99%, 99.5%, or 100% identical to any one of, but not limited to, the amino acid sequences set forth in any one of SEQ ID NOs: 210 to 411 and SEQ ID NOs: 412 to 426. In some embodiments, the randomized antigen polypeptide antigens comprise a sequence identical to any one of those set forth in any one of SEQ ID NOs: 210 to 411 and SEQ ID NOs: 412 to 426. Also envisioned within the present disclosure are randomized antigen polypeptide antigen polypeptide truncations that have 1, 2, 3, 4, 5, 6, 7, 8, 9, 10, 15, 20, or 25 amino acids truncated from the N-terminus or truncated from the C-terminus of any one of SEQ ID NOs: 210 to 411 and SEQ ID NOs: 412 to 426.

[0072] In some embodiments, amino acid residues of a randomized antigen polypeptide vary by 2, 3, or 4 different amino acids. For example, referring to Table 1, the second and the last position of a randomized antigen polypeptide that binds to HLA-A2 will comprise leucine or methionine; and leucine, methionine, or valine, respectively.

[0073] The amino acid sequences in Tables 1 and 2 above include random amino acid residues (‘X’) and explicitly defined amino acids located at residues referred to collectively as anchor positions. The anchor positions specified in the library design can be altered, for example, based on amino acid substitutions set forth in Table 3. One of ordinary skill in the art would appreciate that possible substitutions for X residue in the amino acid sequences of Tables 1 and 2 are not limited and can include additional substitutions without departing from the scope of the disclosure. For example, amino acid substitutions can be used to identify important residues of the peptide sequence that contribute to binding of the HLA or to constrain of expand the members of the library described herein.

[0074] Conservative modifications will produce peptides having functional and chemical characteristics similar to those of the peptide from which such modifications are made. In contrast, substantial modifications in the functional and/or chemical characteristics of the peptides may be accomplished by selecting substitutions in the amino acid sequence that differ significantly in their effect on maintaining (a) the structure of the molecular backbone in the area of the substitution, for example, as a sheet or helical conformation, (b) the charge or hydrophobicity of the molecule at the target site, or (c) the size of the molecule.

[0075] For example, a “conservative amino acid substitution” may involve a substitution of a native amino acid residue with a nonnative residue such that there is little or no effect on the polarity or charge of the amino acid residue at that position. Furthermore, any native residue in the polypeptide may also be substituted with alanine, as has been previously described for “alanine scanning mutagenesis” (see, for example, MacLennan 1998 and Sasaki & Sutoh 1998, which discuss alanine scanning mutagenesis).

[0076] Desired amino acid substitutions (whether conservative or non-conservative) can be determined by those skilled in the art at the time such substitutions are desired. Exemplary amino acid substitutions are set forth in Table 3.

TABLE 3
Amino Acid Substitutions

| Original | |
|---|---|
| Residues | Exemplary Substitutions |
| Ala (A) | Val, Leu, Ile |
| Arg (R) | Lys, Gln, Asn |
| Asn (N) | Gln |
| Asp (D) | Glu |
| Cys (C) | Ser, Ala |
| Gln (Q) | Asn |
| Glu (E) | Asp |
| Gly (G) | Pro, Ala |
| His (H) | Asn, Gln, Lys, Arg |
| Ile (I) | Leu, Val, Met, Ala, Phe, Norleucine (Nle) |
| Leu (L) | Norleucine (Nle), Ile, Val, Met, Ala, Phe |
| Lys (K) | Arg, 1,4 Diaminobutyric Acid (Dab), Gln, Asn |
| Met (M) | Leu, Phe, Ile |
| Phe (F) | Leu, Val, Ile, Ala, Tyr |
| Pro (P) | Ala |
| Ser (S) | Thr, Ala, Cys |
| Thr (T) | Ser |
| Trp (W) | Tyr, Phe |
| Tyr (Y) | Trp, Phe, Thr, Ser |
| Val (V) | Ile, Met, Leu, Phe, Ala, Norleucine (Nle) |

[0077] In certain embodiments, conservative amino acid substitutions also encompass non-naturally occurring amino acid residues which are typically incorporated by chemical peptide synthesis rather than by synthesis in biological systems.

[0078] As noted in the foregoing section “Certain Definitions,” naturally occurring residues may be divided into classes based on common sidechain properties that may be useful for modifications of sequence. For example, non-conservative substitutions may involve the exchange of a member of one of these classes for a member from another class. Such substituted residues may be introduced into regions of the peptide that are homologous with non-human orthologs, or into the non-homologous regions of the molecule. In addition, one may also make modifications using P or G for the purpose of influencing chain orientation.

[0079] In making such modifications, the hydropathic index of amino acids may be considered. Each amino acid has been assigned a hydropathic index on the basis of their hydrophobicity and charge characteristics; these are: isoleucine (+4.5); valine (+4.2); leucine (+3.8); phenylalanine (+2.8); cysteine/cystine (+2.5); methionine (+1.9); alanine (+1.8); glycine (−0.4); threonine (−0.7); serine (−0.8); tryptophan (−0.9); tyrosine (−1.3); proline (−1.6); histidine (−3.2); glutamate (−3.5); glutamine (−3.5); aspartate (−3.5); asparagine (−3.5); lysine (−3.9); and arginine (−4.5).

[0080] The importance of the hydropathic amino acid index in conferring interactive biological function on a protein is understood in the art (Kyte & Doolittle 1982). It is known that certain amino acids may be substituted for other amino acids having a similar hydropathic index or score and still retain a similar biological activity. In making changes based upon the hydropathic index, the substitution of amino acids whose hydropathic indices are within ±2 is preferred, those which are within ±1 are particularly preferred, and those within ±0.5 are even more particularly preferred.

[0081] It is also understood in the art that the substitution of like amino acids can be made effectively on the basis of hydrophilicity. The greatest local average hydrophilicity of a protein, as governed by the hydrophilicity of its adjacent amino acids, correlates with its immunogenicity and antigenicity, i.e. with a biological property of the protein.

[0082] The following hydrophilicity values have been assigned to amino acid residues: arginine (+3.0); lysine (+3.0); aspartate (+3.0±1); glutamate (+3.0±1); serine (+0.3); asparagine (+0.2); glutamine (+0.2); glycine (0); threonine (−0.4); proline (−0.5±1); alanine (−0.5); histidine (−0.5); cysteine (−1.0); methionine (−1.3); valine (−1.5); leucine (−1.8); isoleucine (−1.8); tyrosine (−2.3); phenylalanine (−2.5); tryptophan (−3.4). In making changes based upon similar hydrophilicity values, the substitution of amino acids whose hydrophilicity values are within ±2 is preferred, those which are within ±1 are particularly preferred, and those within ±0.5 are even more particularly preferred. One may also identify epitopes from primary amino acid sequences on the basis of hydrophilicity. These regions are also referred to as “epitopic core regions.”

[0083] A skilled artisan will be able to determine suitable variants of the polypeptide as set forth in the foregoing sequences using well known techniques. For identifying suitable areas of the molecule that may be changed without destroying activity, one skilled in the art may target areas not believed to be important for activity. For example, when similar polypeptides with similar activities from the same species or from other species are known, one skilled in the art may compare the amino acid sequence of a peptide to similar peptides. With such a comparison, one can identify residues and portions of the molecules that are conserved among similar polypeptides. It will be appreciated that changes in areas of a peptide that are not conserved relative to such similar peptides would be less likely to adversely affect the biological activity and/or structure of the peptide. One skilled in the art would also know that, even in relatively conserved regions, one may substitute chemically similar amino acids for the naturally occurring residues while retaining activity (conservative amino acid residue substitutions). Therefore, even areas that may be important for biological activity or for structure may be subject to conservative amino acid substitutions without destroying the biological activity or without adversely affecting the peptide structure.

[0084] Additionally, one skilled in the art can review structure-function studies identifying residues in similar peptides that are important for activity or structure. In view of such a comparison, one can predict the importance of amino acid residues in a peptide that correspond to amino acid residues that are important for activity or structure in similar peptides. One skilled in the art may opt for chemically similar amino acid substitutions for such predicted important amino acid residues of the peptides.

[0085] One skilled in the art can also analyze the three-dimensional structure and amino acid sequence in relation to that structure in similar polypeptides. In view of that information, one skilled in the art may predict the alignment of amino acid residues of a peptide with respect to its three dimensional structure. One skilled in the art may choose not to make radical changes to amino acid residues predicted to be on the surface of the protein, since such residues may be involved in important interactions with other molecules. Moreover, one skilled in the art may generate test variants containing a single amino acid substitution at each desired amino acid residue. The variants can then be screened using activity assays known to those skilled in the art. Such data could be used to gather information about suitable variants. For example, if one discovered that a change to a particular amino acid residue resulted in destroyed, undesirably reduced, or unsuitable activity, variants with such a change would be avoided. In other words, based on information gathered from such routine experiments, one skilled in the art can readily determine the amino acids where further substitutions should be avoided, either alone or in combination with other mutations.

[0086] A number of scientific publications have been devoted to the prediction of secondary structure (see, e.g., Moult 1996; Chou & Fasman 1974a; Chou & Fasman 1974b; Chou & Fasman 1978a; Chou & Fasman 1978b; and Chou & Fasman 1979). Moreover, computer programs are currently available to assist with predicting secondary structure. One method of predicting secondary structure is based upon homology modeling. For example, two polypeptides or proteins which have a sequence identity of greater than 30%, or similarity greater than 40% often have similar structural topologies. The recent growth of the protein structural data base (PDB) has provided enhanced predictability of secondary structure, including the potential number of folds within a polypeptide's or protein's structure (Holm & Sander 1999). It has been suggested that there are a limited number of folds in a given polypeptide or protein and that once a critical number of structures have been resolved, structural prediction will gain dramatically in accuracy (Brenner 1997).

[0087] Additional methods of predicting secondary structure include “threading” (Jones 1997; Sippl & Flockner 1996), “profile analysis” (Bowie 1991; Gribskov 1987; Gribskov 1990), and “evolutionary linkage” (Holm & Sander 1999; Brenner 1997).

TABLE 4
Nucleic Acid Sequences Encoding
Randomized Polypeptide Antigens

| HLA | SEQ | |
|---|---|---|
| type | ID NO: | Sequence |
| HLA A2 | 210 | nnkmtgnnknnknnknnknnkntg |
| | 211 | nnkmtgnnknnknnknnknnknnkntg |
| | 212 | nnkmtgnnknnknnknnknnknnknnkntg |
| | 213 | nnkmtgnnknnknnknnknnknnknnknnkntg |
| HLA A1 | 214 | nnknnkgaknnknnknnknnknnktat |
| | 215 | nnknnkgaknnknnknnknnknnknnktat |
| | 216 | nnknnkgaknnknnknnknnknnknnknnktat |
| HLA A3 | 217 | nnkvtgnnknnknnknnknnkaaa |
| | 218 | nnkvtgnnknnknnknnknnknnkaaa |
| | 219 | nnkvtgnnknnknnknnknnknnknnkaaa |
| | 220 | nnkvtgnnknnknnknnknnknnknnknnkaaa |
| | 221 | nnkvtgnnknnknnknnknnknnknnknnknnkaaa |
| HLA A11 | 222 | nnkbttnnknnknnknnknnkara |
| | 223 | nnkbttnnknnknnknnknnknnkara |
| | 224 | nnkbttnnknnknnknnknnknnknnkara |
| | 225 | nnkbttnnknnknnknnknnknnknnknnkara |
| | 226 | nnkbttnnknnknnknnknnknnknnknnknnkara |
| HLA A23 | 227 | nnknnknnknnknnknnknnktay |
| | 228 | nnknnknnknnknnknnknnknnktay |
| | 229 | nnknnknnknnknnknnknnknnknnktay |
| | 230 | nnknnknnknnknnknnknnknnknnknnktay |
| | 231 | nnknnknnknnknnknnknnknnknnknnknnktay |
| HLA A24 | 232 | nnktwtnnknnknnknnknnkhtt |
| | 233 | nnktwtnnknnknnknnknnknnkhtt |
| | 234 | nnktwtnnknnknnknnknnknnknnkhtt |
| | 235 | nnktwtnnknnknnknnknnknnknnknnkhtt |
| | 236 | nnktwtnnknnknnknnknnknnknnknnknnkhtt |
| HLA A26 | 237 | nnkbthnnknnknnknnknnktwy |
| | 238 | nnkayynnknnknnknnknnktwy |
| | 239 | nnkbthnnknnknnknnknnknnktwy |
| | 240 | nnkayynnknnknnknnknnknnktwy |
| | 241 | nnkbthnnknnknnknnknnknnknnktwy |
| | 242 | nnkayynnknnknnknnknnknnknnktwy |
| | 243 | nnkbthnnknnknnknnknnknnknnknnktwy |
| | 244 | nnkayynnknnknnknnknnknnknnknnktwy |
| | 245 | nnkbthnnknnknnknnknnknnknnknnknnktwy |
| | 246 | nnkayynnknnknnknnknnknnknnknnknnktwy |
| HLA A30 | 247 | nnktwynnknnknnknnknnkctn |
| | 248 | nnktwynnknnknnknnknnknnkctn |
| | 249 | nnktwynnknnknnknnknnknnknnkctn |
| | 250 | nnktwynnknnknnknnknnknnknnknnkctn |
| | 251 | nnktwynnknnknnknnknnknnknnknnknnkctn |
| HLA A31 | 252 | nnknnknnknnknnknnknnkarr |
| | 253 | nnknnknnknnknnknnknnknnkarr |
| | 254 | nnknnknnknnknnknnknnknnknnkarr |
| | 255 | nnknnknnknnknnknnknnknnknnknnkarr |
| | 256 | nnknnknnknnknnknnknnknnknnknnknnkarr |
| HLA A33 | 257 | nnknnknnknnknnknnknnkarr |
| | 258 | nnknnknnknnknnknnknnknnkarr |
| | 259 | nnknnknnknnknnknnknnknnknnkarr |
| | 260 | nnknnknnknnknnknnknnknnknnknnkarr |
| | 261 | nnknnknnknnknnknnknnknnknnknnknnkarr |
| HLA A68 | 262 | nnkgttnnknnknnknnknnkarr |
| | 263 | nnkgttnnknnknnknnknnknnkarr |
| | 264 | nnkgttnnknnknnknnknnknnknnkarr |
| | 265 | nnkgttnnknnknnknnknnknnknnknnkarr |
| | 266 | nnkgttnnknnknnknnknnknnknnknnknnkarr |
| | 267 | nnkactnnknnknnknnknnkarr |
| | 268 | nnkactnnknnknnknnknnknnkarr |
| | 269 | nnkactnnknnknnknnknnknnknnkarr |
| | 270 | nnkactnnknnknnknnknnknnknnknnkarr |
| | 271 | nnkactnnknnknnknnknnknnknnknnknnkarr |
| HLA B7 | 272 | nnkcctnnknnknnknnknnkctt |
| | 273 | nnkcctnnknnknnknnknnknnkctt |
| | 274 | nnkcctnnknnknnknnknnknnknnkctt |
| | 275 | nnkcctnnknnknnknnknnknnknnknnkctt |
| | 276 | nnkcctnnknnknnknnknnknnknnknnknnkctt |
| HLA B8 | 277 | nnknnkaaannkarannknnkctt |
| | 278 | nnknnkaaannkarannknnknnkctt |
| | 279 | nnknnkaaannkarannknnknnknnkctt |
| | 280 | nnknnkaaannkarannknnknnknnknnkctt |
| | 281 | nnknnkaaannkarannknnknnknnknnknnkctt |
| HLA B15 | 282 | nnkcwannknnknnknnknnktwt |
| | 283 | nnkcwannknnknnknnknnknnktwt |
| | 284 | nnkcwannknnknnknnknnknnknnktwt |
| | 285 | nnkcwannknnknnknnknnknnknnknnktwt |
| | 286 | nnkcwannknnknnknnknnknnknnknnknnktwt |
| HLA B27 | 287 | nnkagannknnknnknnknnktwt |
| | 288 | nnkagannknnknnknnknnknnktwt |
| | 289 | nnkagannknnknnknnknnknnknnktwt |
| | 290 | nnkagannknnknnknnknnknnknnknnktwt |
| | 291 | nnkagannknnknnknnknnknnknnknnknnktwt |
| HLA B35 | 292 | nnkcctnnknnknnknnknnktwt |
| | 293 | nnkcctnnknnknnknnknnknnktwt |
| | 294 | nnkcctnnknnknnknnknnknnknnktwt |
| | 295 | nnkcctnnknnknnknnknnknnknnknnktwt |
| | 296 | nnkcctnnknnknnknnknnknnknnknnknnktwt |
| | 297 | nnkcctnnknnknnknnknnkmtr |
| | 298 | nnkcctnnknnknnknnknnknnkmtr |
| | 299 | nnkcctnnknnknnknnknnknnknnkmtr |
| | 300 | nnkcctnnknnknnknnknnknnknnknnkmtr |
| | 301 | nnkcctnnknnknnknnknnknnknnknnknnkmtr |
| HLA B40 | 302 | nnkgaannknnknnknnknnkctt |
| | 303 | nnkgaannknnknnknnknnknnkctt |
| | 304 | nnkgaannknnknnknnknnknnknnkctt |
| | 305 | nnkgaannknnknnknnknnknnknnknnkctt |
| | 306 | nnkgaannknnknnknnknnknnknnknnknnkctt |
| HLA B51 | 307 | nnkgstnnknnknnknnknnkrtt |
| | 308 | nnkgstnnknnknnknnknnknnkrtt |
| | 309 | nnkgstnnknnknnknnknnknnknnkrtt |
| | 310 | nnkgstnnknnknnknnknnknnknnknnkrtt |
| | 311 | nnkgstnnknnknnknnknnknnknnknnknnkrtt |
| | 312 | nnkcctnnknnknnknnknnkrtt |
| | 313 | nnkcctnnknnknnknnknnknnkrtt |
| | 314 | nnkcctnnknnknnknnknnknnknnkrtt |
| | 315 | nnkcctnnknnknnknnknnknnknnknnkrtt |
| | 316 | nnkcctnnknnknnknnknnknnknnknnknnkrtt |
| HLA B44 | 317 | nnkgaannknnknnknnknnktwt |
| | 318 | nnkgaannknnknnknnknnknnktwt |
| | 319 | nnkgaannknnknnknnknnknnknnktwt |
| | 320 | nnkgaannknnknnknnknnknnknnknnktwt |
| | 321 | nnkgaannknnknnknnknnknnknnknnknnktwt |
| HLA B53 | 322 | nnkcctnnknnknnknnknnktgg |
| | 323 | nnkcctnnknnknnknnknnknnktgg |
| | 324 | nnkcctnnknnknnknnknnknnknnktgg |
| | 325 | nnkcctnnknnknnknnknnknnknnknnktgg |
| | 326 | nnkcctnnknnknnknnknnknnknnknnknnktgg |
| | 327 | nnkcctnnknnknnknnknnkytt |
| | 328 | nnkcctnnknnknnknnknnknnkytt |
| | 329 | nnkcctnnknnknnknnknnknnknnkytt |
| | 330 | nnkcctnnknnknnknnknnknnknnknnkytt |
| | 331 | nnkcctnnknnknnknnknnknnknnknnknnkytt |
| HLA B57 | 332 | nnkdctnnknnknnknnknnktwt |
| | 333 | nnkdctnnknnknnknnknnknnktwt |
| | 334 | nnkdctnnknnknnknnknnknnknnktwt |
| | 335 | nnkdctnnknnknnknnknnknnknnknnktwt |
| | 336 | nnkdctnnknnknnknnknnknnknnknnknnktwt |
| | 337 | nnkdctnnknnknnknnknnktgg |
| | 338 | nnkdctnnknnknnknnknnknnktgg |
| | 339 | nnkdctnnknnknnknnknnknnknnktgg |
| | 340 | nnkdctnnknnknnknnknnknnknnknnktgg |
| | 341 | nnkdctnnknnknnknnknnknnknnknnknnktgg |
| HLA C1 | 342 | nnkttannknnknnknnknnktta |
| | 343 | nnkttannknnknnknnknnknnktta |
| | 344 | nnkttannknnknnknnknnknnknnktta |
| | 345 | nnkttannknnknnknnknnknnknnknnktta |
| | 346 | nnkttannknnknnknnknnknnknnknnknnktta |
| | 347 | nnkgctnnknnknnknnknnktta |
| | 348 | nnkgctnnknnknnknnknnknnktta |
| | 349 | nnkgctnnknnknnknnknnknnknnktta |
| | 350 | nnkgctnnknnknnknnknnknnknnknnktta |
| | 351 | nnkgctnnknnknnknnknnknnknnknnknnktta |
| HLA C2 | 352 | nnkgctnnknnknnknnknnkstc |
| | 353 | nnkgctnnknnknnknnknnknnkstc |
| | 354 | nnkgctnnknnknnknnknnknnknnkstc |
| | 355 | nnkgctnnknnknnknnknnknnknnknnkstc |
| | 356 | nnkgctnnknnknnknnknnknnknnknnknnkstc |
| | 357 | nnkgctnnknnknnknnknnktwt |
| | 358 | nnkgctnnknnknnknnknnknnktwt |
| | 359 | nnkgctnnknnknnknnknnknnknnktwt |
| | 360 | nnkgctnnknnknnknnknnknnknnknnktwt |
| | 361 | nnkgctnnknnknnknnknnknnknnknnknnktwt |
| HLA C3 | 362 | nnknnknnknnknnknnknnkhtk |
| | 363 | nnknnknnknnknnknnknnknnkhtk |
| | 364 | nnknnknnknnknnknnknnknnknnkhtk |
| | 365 | nnknnknnknnknnknnknnknnknnknnkhtk |
| | 366 | nnknnknnknnknnknnknnknnknnknnknnkhtk |
| HLA C4 | 367 | nnktwtnnknnknnknnknnkhtk |
| | 368 | nnktwtnnknnknnknnknnknnkhtk |
| | 369 | nnktwtnnknnknnknnknnknnknnkhtk |
| | 370 | nnktwtnnknnknnknnknnknnknnknnkhtk |
| | 371 | nnktwtnnknnknnknnknnknnknnknnknnkhtk |
| | 372 | nnkcctnnknnknnknnknnkhtk |
| | 373 | nnkcctnnknnknnknnknnknnkhtk |
| | 374 | nnkcctnnknnknnknnknnknnknnkhtk |
| | 375 | nnkcctnnknnknnknnknnknnknnknnkhtk |
| | 376 | nnkcctnnknnknnknnknnknnknnknnknnkhtk |
| HLA C5 | 377 | nnknnkgatnnknnknnknnkstt |
| | 378 | nnknnkgatnnknnknnknnknnkstt |
| | 379 | nnknnknnkgatnnknnknnknnknnkstt |
| | 380 | nnknnknnknnkgatnnknnknnknnknnkstt |
| | 381 | nnknnknnknnkgatnnknnknnknnknnknnkstt |
| HLA C6 | 382 | nnknnknnknnknnknnknnkvtt |
| | 383 | nnknnknnknnknnknnknnknnkvtt |
| | 384 | nnknnknnknnknnknnknnknnknnkvtt |
| | 385 | nnknnknnknnknnknnknnknnknnknnkvtt |
| | 386 | nnknnknnknnknnknnknnknnknnknnknnkvtt |
| | 387 | nnknnknnknnknnknnknnktat |
| | 388 | nnknnknnknnknnknnknnknnktat |
| | 389 | nnknnknnknnknnknnknnknnknnktat |
| | 390 | nnknnknnknnknnknnknnknnknnknnktat |
| | 391 | nnknnknnknnknnknnknnknnknnknnknnktat |
| HLA C7 | 392 | nnknnknnknnknnknnknnkytt |
| | 393 | nnknnknnknnknnknnknnknnkytt |
| | 394 | nnknnknnknnknnknnknnknnknnkytt |
| | 395 | nnknnknnknnknnknnknnknnknnknnkytt |
| | 396 | nnknnknnknnknnknnknnknnknnknnknnkytt |
| | 397 | nnknnknnknnknnknnknnktat |
| | 398 | nnknnknnknnknnknnknnknnktat |
| | 399 | nnknnknnknnknnknnknnknnknnktat |
| | 400 | nnknnknnknnknnknnknnknnknnknnktat |
| | 401 | nnknnknnknnknnknnknnknnknnknnknnktat |
| HLA C8 | 402 | nnknnkgatnnknnknnkctt |
| | 403 | nnknnkgatnnknnknnknnkctt |
| | 404 | nnknnkgatnnknnknnknnknnkctt |
| | 405 | nnknnkgatnnknnknnknnknnknnkat |
| | 406 | nnknnkgatnnknnknnknnknnknnknnkat |
| HLA E | 407 | nnkmtgnnknnknnknnknnkstt |
| | 408 | nnkmtgnnknnknnknnknnknnkstt |
| | 409 | nnkmtgnnknnknnknnknnknnknnkstt |
| | 410 | nnkmtgnnknnknnknnknnknnknnknnkstt |
| | 411 | nnkmtgnnknnknnknnknnknnknnknnknnkstt |

TABLE 5
Additional Nucleic Acid Sequences Encoding
Randomized Polypeptide Antigens for HLA A11

| SEQ ID NO: | Sequence |
|---|---|
| 412 | nnkvttnnknnknnknnknnkara |
| 413 | nnkvttnnknnknnknnknnknnkara |
| 414 | nnkvttnnknnknnknnknnknnknnkara |
| 415 | nnkvttnnknnknnknnknnknnknnknnkara |
| 416 | nnkvttnnknnknnknnknnknnknnknnknnkara |
| 417 | nnktwtnnknnknnknnknnknnkara |
| 418 | nnktwtnnknnknnknnknnkara |
| 419 | nnktwtnnknnknnknnknnknnknnkara |
| 420 | nnktwtnnknnknnknnknnknnknnknnkara |
| 421 | nnktwtnnknnknnknnknnknnknnknnknnkara |
| 422 | nnkwatnnknnknnknnknnkara |
| 423 | nnkwatnnknnknnknnknnknnkara |
| 424 | nnkwatnnknnknnknnknnknnknnkara |
| 425 | nnkwatnnknnknnknnknnknnknnknnkara |
| 426 | nnkwatnnknnknnknnknnknnknnknnknnkara |

[0088] One advantage of a randomized antigen polypeptide is that a single nucleic acid with a degenerate base code can potentially express a large amount of different randomized antigen polypeptides, which increases the chances that any one screening experiment will identify one or more randomized antigen polypeptides that interact with a certain TCR. In some embodiments, the nucleic acid that encodes the randomized antigen polypeptide can encode at least 1×10⁴, at least 1×10⁵, at least 1×10⁶, at least 1×10⁷, at least 1×10⁸, at least 1×10⁹, at least 1×10¹⁰, at least 1×10¹¹, at least 1×10¹², at least 1×10¹³, at least 1×10¹⁴, or at least 1×10¹⁵ different randomized polypeptide antigens.

[0089] Peptide antigens that bind in the binding cleft of an HLA molecule are generally of a restricted length range. The majority of polypeptides that bind to class I HLA molecules are 8, 9, 10, or 11 amino acids in length. In some embodiments, the randomized antigen polypeptide which binds to an HLA molecule and forming the HLA-antigen polypeptide complexes of the present disclosure is between 8 and 11 amino acids in length. In some embodiments, the randomized antigen polypeptide is between 8 and 10 amino acids in length. In some embodiments, the randomized antigen polypeptide is 8 amino acids in length. In some embodiments, the randomized antigen polypeptide is 9 amino acids in length. In some embodiments, the randomized antigen polypeptide is 10 amino acids in length. In some embodiments, the randomized antigen polypeptide is 11 amino acids in length.

[0090] Another constituent of the HLA-antigen polypeptide complexes described herein is an HLA molecule, such as an HLA polypeptide. For the purposes of the current disclosure, the HLA molecule is a class I major histocompatibility molecule. In some embodiments, the plurality of HLA polypeptides of the HLA-antigen polypeptide complexes of the current disclosure (HLA-antigen complexes) can comprise any of the following loci and alleles: A3, A11, A23, A24, A26, A30, A31, A33, A68, B7, B8, B15, B27, B40, B44, B51, B53, C1, C2, C3, C4, C5, C6, C7, C8, and E. In some embodiments, each of the HLA-antigen complexes in the plurality of HLA-antigen complexes comprise an HLA polypeptide selected from the group of HLA polypeptides consisting of A3, A11, A23, A24, A26, A30, A31, A33, A68, B7, B8, B15, B27, B40, B44, B51, B53, C1, C2, C3, C4, C5, C6, C7, C8, and E. In some embodiments, the plurality of HLA-antigen complexes comprises at least five, ten, fifteen, twenty, or twenty-five different HLA polypeptides selected from the group of HLA polypeptides consisting of A3, A11, A23, A24, A26, A30, A31, A33, A68, B7, B8, B15, B27, B40, B44, B51, B53, C1, C2, C3, C4, C5, C6, C7, C8, and E. In some embodiments, the plurality of HLA-antigen complexes comprises all of the HLA polypeptides in the group of HLA polypeptides consisting of A3, A11, A23, A24, A26, A30, A31, A33, A68, B7, B8, B15, B27, B40, B44, B51, B53, C1, C2, C3, C4, C5, C6, C7, C8, and E.

[0091] In some embodiments, the amino acid sequence of the HLA polypeptide of the HLA-antigen polypeptide complex can comprise any of the amino acid sequences set forth in Table 6. In some embodiments, the HLA polypeptide comprises an amino acid sequence that is at least about 70%, 75%, 80%, 85%, 87%, 87.5%, 90%, 95%, 97%, 97.5%, 98%, 98.5%, 99%, 99.5%, or 100% identical to any one of, but not limited to, the amino acid sequences set forth in any one of SEQ ID NOs: 427 to 455. In some embodiments, the HLA polypeptide comprises an amino acid sequence identical to any one of those set forth in any one of SEQ ID NOs: 427 to 455. In some embodiments, a portion of the HLA polypeptide that comprises the peptide binding cleft is identical to any one of SEQ ID Nos: 251 to 279, and the non-peptide binding cleft residues are at least about 70%, 75%, 80%, 85%, 87.5%, 90%, 95%, 97%, 98%, 99%, or 100% identical to any one of SEQ ID NOs: 427 to 455. Also envisioned within the present disclosure are HLA polypeptide truncations that have 1, 2, 3, 4, 5, 6, 7, 8, 9, 10, 15, 20, or 25 amino acids truncated from the N-terminus or truncated from the C-terminus of any one of SEQ ID NOs: 427 to 455.

TABLE 6
HLA Allele Amino Acid Sequences

| SEQ ID NO: | Amino Acid Sequence |
|---|---|
| 427 | GSHSMRYFFTSVSRPGRGEPRFIAVGYVDDTQFVRFDSDAASQKMEPRAPWIEQEGPEYWDQETRNMKAH |
| | SQTDRANLGTLRGAYNQSEDGSHTIQIMYGCDVGPDGRFLRGYRQDAYDGKDYIALNEDLRSWTAADMAA |
| | QITKRKWEAVHAAEQRRVYLEGRCVDGLRRYLENGKETLQRTDPPKTHMTHHPISDHEATLRCWALGFYP |
| | AEITLTWQRDGEDQTQDTELVETRPAGDGTFQKWAAVVVPSGEEQRYTCHVQHEGLPKPLTLRWELSS |
| 428 | GSHSMRYFFTSVSRPGRGEPRFIAVGYVDDTQFVRFDSDAASQRMEPRAPWIEQEGPEYWDQETRNVKAQ |
| | SQTDRVDLGTLRGAYNQSEAGSHTIQIMYGCDVGSDGRFLRGYRQDAYDGKDYIALNEDLRSWTAADMAA |
| | QITKRKWEAAHEAEQLRAYLDGTCVEWLRRYLENGKETLQRTDPPKTHMTHHPISDHEATLRCWALGFYP |
| | AEITLTWQRDGEDQTQDTELVETRPAGDGTFQKWAAVVVPSGEEQRYTCHVQHEGLPKPLTLRWELSS |
| 429 | GSHSMRYFYTSVSRPGRGEPRFIAVGYVDDTQFVRFDSDAASQRMEPRAPWIEQEGPEYWDQETRNVKAQ |
| | SQTDRVDLGTLRGAYNQSEDGSHTIQEVIYGCDVGPDGRFLRGYRQDAYDGKDYIALNEDLRSWTAADMA |
| | AQITKRKWEAAHAAEQQRAYLEGRCVEWLRRYLENGKETLQRTDPPKTHMTHHPISDHEATLRCWALGEY |
| | PAEITLTWQRDGEDQTQDTELVETRPAGDGTFQKWAAVVVPSGEEQRYTCHVQHEGLPKPLTLRWELSS |
| 430 | GSHSMRYFSTSVSRPGRGEPRFIAVGYVDDTQFVREDSDAASQRMEPRAPWIEQEGPEYWDEETGKVKAH |
| | SQTDRENLRIALRAYNQSEAGSHTLQMMFGCDVGSDGRFLRGYHQYAYDGKDYIALKEDLRSWTAADMAA |
| | QITQRKWEAARVAEQLRAYLEGTCVDGLRRYLENGKETLQRTDPPKTHMTHHPISDHEATLRCWALGFYP |
| | AEITLTWQRDGEDQTQDTELVETRPAGDGTFQKWAAVVVPSGEEQRYTCHVQHEGLPKPLTLRWEPSS |
| 431 | GSHSMRYFSTSVSRPGRGEPRFIAVGYVDDTQFVREDSDAASQRMEPRAPWIEQEGPEYWDEETGKVKAH |
| | SQTDRENLRIALRAYNQSEAGSHTLQMMFGCDVGSDGRFLRGYHQYAYDGKDYIALKEDLRSWTAADMAA |
| | QITKRKWEAAHVAEQQRAYLEGTCVDGLRRYLENGKETLQRTDPPKTHMTHHPISDHEATLRCWALGEYP |
| | AEITLTWQRDGEDQTQDTELVETRPAGDGTFQKWAAVVVPSGEEQRYTCHVQHEGLPKPLTLRWEPSS |
| 432 | GSHSMRYFSTSVSRPGSGEPRFIAVGYVDDTQFVREDSDAASQRMEPRAPWIEQERPEYWDQETRNVKAQ |
| | SQTDRVDLGTLRGAYNQSEAGSHTIQIMYGCDVGSDGRFLRGYEQHAYDGKDYIALNEDLRSWTAADMAA |
| | QITQRKWEAARWAEQLRAYLEGTCVEWLRRYLENGKETLQRTDPPKTHMTHHPISDHEATLRCWALGEYP |
| | AEITLTWQRDGEDQTQDTELVETRPAGDGTFQKWAAVVVPSGEEQRYTCHVQHEGLPKPLTLRWELSS |
| 433 | GSHSMRYFTTSVSRPGRGEPRFIAVGYVDDTQFVRFDSDAASQRMEPRAPWIEQERPEYWDQETRNVKAH |
| | SQIDRVDLGTLRGAYNQSEAGSHTIQMMYGCDVGSDGRFLRGYQQDAYDGKDYIALNEDLRSWTAADMAA |
| | QITQRKWEAARVAEQLRAYLEGTCVEWLRRYLENGKETLQRTDPPKTHMTHHAVSDHEATLRCWALSFYP |
| | AEITLTWQRDGEDQTQDTELVETRPAGDGTFQKWASVVVPSGQEQRYTCHVQHEGLPKPLTLRWEPSS |
| 434 | GSHSMRYFTTSVSRPGRGEPRFIAVGYVDDTQFVRFDSDAASQRMEPRAPWIEQEGPEYWDRNTRNVKAH |
| | SQIDRVDLGTLRGAYNQSEAGSHTIQMMYGCDVGSDGRFLRGYQQDAYDGKDYIALNEDLRSWTAADMAA |
| | QITQRKWEAARVAEQLRAYLEGTCVEWLRRYLENGKETLQRTDPPKTHMTHHAVSDHEATLRCWALSFYP |
| | AEITLTWQRDGEDQTQDTELVETRPAGDGTFQKWASVVVPSGQEQRYTCHVQHEGLPKPLTLRWEPSS |
| 435 | GSHSMRYFYTSMSRPGRGEPRFIAVGYVDDTQFVREDSDAASQRMEPRAPWIEQEGPEYWDRNTRNVKAQ |
| | SQTDRVDLGTLRGAYNQSEAGSHTIQRMYGCDVGPDGRFLRGYHQYAYDGKDYIALKEDLRSWTAADMAA |
| | QTTKHKWEAAHVAEQWRAYLEGTCVEWLRRYLENGKETLQRTDAPKTHMTHHAVSDHEATLRCWALSFYP |
| | AEITLTWQRDGEDQTQDTELVETRPAGDGTFQKWVAVVVPSGQEQRYTCHVQHEGLPKPLTLRWEPSS |
| 436 | GSHSMRYFYTSVSRPGRGEPRFISVGYVDDTQFVREDSDAASPREEPRAPWIEQEGPEYWDRNTQIYKAQ |
| | AQTDRESLRNLRGAYNQSEAGSHTLQSMYGCDVGPDGRLLRGHDQYAYDGKDYIALNEDLRSWTAADTAA |
| | QITQRKWEAAREAEQRRAYLEGECVEWLRRYLENGKDKLERADPPKTHVTHHPISDHEATLRCWALGEYP |
| | AEITLTWQRDGEDQTQDTELVETRPAGDRTFQKWAAVVVPSGEEQRYTCHVQHEGLPKPLTLRWEPSS |
| 437 | GSHSMRYFDTAMSRPGRGEPRFISVGYVDDTQFVREDSDAASPREEPRAPWIEQEGPEYWDRNTQIFKTN |
| | TQTDRESLRNLRGAYNQSEAGSHTLQSMYGCDVGPDGRLLRGHNQYAYDGKDYIALNEDLRSWTAADTAA |
| | QITQRKWEAARVAEQDRAYLEGTCVEWLRRYLENGKDTLERADPPKTHVTHHPISDHEATLRCWALGFYP |
| | AEITLTWQRDGEDQTQDTELVETRPAGDRTFQKWAAVVVPSGEEQRYTCHVQHEGLPKPLTLRWEPSS |
| 438 | GSHSMRYFYTAMSRPGRGEPRFIAVGYVDDTQFVRFDSDAASPRMAPRAPWIEQEGPEYWDRETQISKTN |
| | TQTYRESLRNLRGAYNQSEAGSHTLQRMYGCDVGPDGRLLRGHDQSAYDGKDYIALNEDLSSWTAADTAA |
| | QITQRKWEAAREAEQWRAYLEGLCVEWLRRYLENGKETLQRADPPKTHVTHHPISDHEATLRCWALGEYP |
| | AEITLTWQRDGEDQTQDTELVETRPAGDRTFQKWAAVVVPSGEEQRYTCHVQHEGLPKPLTLRWEPSS |
| 439 | GSHSMRYFHTAMSRPGRGEPRFITVGYVDDTLFVRFDSDATSPRKEPRAPWIEQEGPEYWDRETQISKTN |
| | TQTYRESLRNLRGAYNQSEAGSHTLQRMYGCDVGPDGRLLRGHNQYAYDGKDYIALNEDLRSWTAADTAA |
| | QISQRKLEAARVAEQLRAYLEGECVEWLRRYLENGKDKLERADPPKTHVTHHPISDHEATLRCWALGFYP |
| | AEITLTWQRDGEDQTQDTELVETRPAGDRTFQKWAAVVVPSGEEQRYTCHVQHEGLPKPLTLRWEPSS |
| 440 | GSHSMRYFHTSVSRPGRGEPRFITVGYVDDTLFVRFDSDATSPRKEPRAPWIEQEGPEYWDRETQISKTN |
| | TQTYRESLRNLRGAYNQSEAGSHTLQSMYGCDVGPDGRLLRGHNQYAYDGKDYIALNEDLRSWTAADTAA |
| | QITQRKWEAARVAEQLRAYLEGECVEWLRRYLENGKETLQRADPPKTHVTHHPISDHEATLRCWALGFYP |
| | AEITLTWQRDGEDQTQDTELVETRPAGDRTFQKWAAVVVPSGEEQRYTCHVQHEGLPKPLTLRWEPSS |
| 441 | GSHSMRYFYTAMSRPGRGEPRFITVGYVDDTLFVRFDSDATSPRKEPRAPWIEQEGPEYWDRETQISKTN |
| | TQTYRENLRTALRAYNQSEAGSHIIQRMYGCDVGPDGRLLRGYDQDAYDGKDYIALNEDLSSWTAADTAA |
| | QITQRKWEAARVAEQDRAYLEGLCVESLRRYLENGKETLQRADPPKTHVTHHPISDHEVTLRCWALGEYP |
| | AEITLTWQRDGEDQTQDTELVETRPAGDRTFQKWAAVVVPSGEEQRYTCHVQHEGLPKPLTLRWEPSS |
| 442 | GSHSMRYFYTAMSRPGRGEPRFITVGYVDDTLFVRFDSDATSPRKEPRAPWIEQEGPEYWDRETQISKTN |
| | TQTYRENLRTALRAYNQSEAGSHIIQRMYGCDVGPDGRLLRGYDQDAYDGKDYIALNEDLSSWTAADTAA |
| | QITQRKWEAARVAEQLRAYLEGLCVESLRRYLENGKETLQRADPPKTHVTHHPISDHEVTLRCWALGEYP |
| | AEITLTWQRDGEDQTQDTELVETRPAGDRTFQKWAAVVVPSGEEQRYTCHVQHEGLPKPLTLRWEPSS |
| 443 | GSHSMRYFYTAMSRPGRGEPRFIAVGYVDDTQFVRFDSDAASPRTEPRAPWIEQEGPEYWDRNTQIFKTN |
| | TQTYRENLRIALRAYNQSEAGSHTWQTMYGCDVGPDGRLLRGHNQYAYDGKDYIALNEDLSSWTAADTAA |
| | QITQRKWEAAREAEQLRAYLEGLCVEWLRRHLENGKETLQRADPPKTHVTHHPVSDHEATLRCWALGFYP |
| | AEITLTWQRDGEDQTQDTELVETRPAGDRTFQKWAAVVVPSGEEQRYTCHVQHEGLPKPLTLRWEPSS |
| 444 | GSHSMRYFYTAMSRPGRGEPRFIAVGYVDDTQFVRFDSDAASPRTEPRAPWIEQEGPEYWDRNTQIFKTN |
| | TQTYRENLRIALRAYNQSEAGSHIIQRMYGCDLGPDGRLLRGHDQSAYDGKDYIALNEDLSSWTAADTAA |
| | QITQRKWEAARVAEQLRAYLEGLCVEWLRRYLENGKETLQRADPPKTHVTHHPVSDHEATLRCWALGFYP |
| | AEITLTWQRDGEDQTQDTELVETRPAGDRTFQKWAAVVVPSGEEQRYTCHVQHEGLPKPLTLRWEPSS |
| 445 | GSHSMRYFYTAMSRPGRGEPRFIAVGYVDDTQFVRFDSDAASPRTEPRAPWIEQEGPEYWDGETRNMKAS |
| | AQTYRENLRIALRAYNQSEAGSHIIQRMYGCDLGPDGRLLRGHDQSAYDGKDYIALNEDLSSWTAADTAA |
| | QITQRKWEAARVAEQLRAYLEGLCVEWLRRYLENGKETLQRADPPKTHVTHHPVSDHEATLRCWALGFYP |
| | AEITLTWQRDGEDQTQDTELVETRPAGDRTFQKWAAVVVPSGEEQRYTCHVQHEGLPKPLTLRWEPSS |
| 446 | CSHSMKYFFTSVSRPGRGEPRFISVGYVDDTQFVREDSDAASPRGEPRAPWVEQEGPEYWDRETQKYKRQ |
| | AQTDRVSLRNLRGAYNQSEAGSHTLQWMCGCDLGPDGRLLRGYDQYAYDGKDYIALNEDLRSWTAADTAA |
| | QITQRKWEAAREAEQRRAYLEGTCVEWLRRYLENGKETLQRAEHPKTHVTHHPVSDHEATLRCWALGEYP |
| | AEITLTWQWDGEDQTQDTELVETRPAGDGTFQKWAAVMVPSGEEQRYTCHVQHEGLPEPLTLRWEPSS |
| 447 | CSHSMRYFYTAVSRPSRGEPHFIAVGYVDDTQFVRFDSDAASPRGEPRAPWVEQEGPEYWDRETQKYKRQ |
| | AQTDRVNLRKLRGAYNQSEAGSHTLQRMYGCDLGPDGRLLRGYDQSAYDGKDYIALNEDLRSWTAADTAA |
| | QITQRKWEAAREAEQWRAYLEGECVEWLRRYLENGKETLQRAEHPKTHVTHHPVSDHEATLRCWALGFYP |
| | TEITLTWQRDGEDQTQDTELVETRPAGDGTFQKWAAVVVPSGEEQRYTCHVQHEGLPEPLTLRWEPSS |
| 448 | GSHSMRYFYTAVSRPGRGEPHFIAVGYVDDTQFVRFDSDAASPRGEPRAPWVEQEGPEYWDRETQKYKRQ |
| | AQTDRVSLRNLRGAYNQSEAGSHIIQRMYGCDVGPDGRLLRGYDQYAYDGKDYIALNEDLRSWTAADTAA |
| | QITQRKWEAAREAEQLRAYLEGLCVEWLRRYLKNGKETLQRAEHPKTHVTHHPVSDHEATLRCWALGEYP |
| | AEITLTWQWDGEDQTQDTELVETRPAGDGTFQKWAAVVVPSGEEQRYTCHVQHEGLPEPLTLRWEPSS |
| 449 | GSHSMRYFSTSVSWPGRGEPRFIAVGYVDDTQFVREDSDAASPRGEPREPWVEQEGPEYWDRETQKYKRQ |
| | AQADRVNLRKLRGAYNQSEDGSHTLQRMEGCDLGPDGRLLRGYNQFAYDGKDYIALNEDLRSWTAADTAA |
| | QITQRKWEAAREAEQRRAYLEGTCVEWLRRYLENGKETLQRAEHPKTHVTHHPVSDHEATLRCWALGEYP |
| | AEITLTWQWDGEDQTQDTELVETRPAGDGTFQKWAAVVVPSGEEQRYTCHVQHEGLPEPLTLRWKPSS |
| 450 | CSHSMRYFYTAVSRPGRGEPRFIAVGYVDDTQFVQFDSDAASPRGEPRAPWVEQEGPEYWDRETQKYKRQ |
| | AQTDRVNLRKLRGAYNQSEAGSHTLQRMYGCDLGPDGRLLRGYNQFAYDGKDYIALNEDLRSWTAADKAA |
| | QITQRKWEAAREAEQRRAYLEGTCVEWLRRYLENGKKTLQRAEHPKTHVTHHPVSDHEATLRCWALGEYP |
| | AEITLTWQRDGEDQTQDTELVETRPAGDGTFQKWAAVVVPSGEEQRYTCHVQHEGLPEPLTLRWGPSS |
| 451 | CSHSMRYFDTAVSRPGRGEPRFISVGYVDDTQFVREDSDAASPRGEPRAPWVEQEGPEYWDRETQKYKRQ |
| | AQADRVNLRKLRGAYNQSEDGSHTLQWMYGCDLGPDGRLLRGYDQSAYDGKDYIALNEDLRSWTAADTAA |
| | QITQRKWEAAREAEQWRAYLEGTCVEWLRRYLENGKETLQRAEHPKTHVTHHPVSDHEATLRCWALGFYP |
| | AEITLTWQRDGEDQTQDTELVETRPAGDGTFQKWAAVVVPSGEEQRYTCHVQHEGLPEPLTLRWEPSS |
| 452 | CSHSMRYFDTAVSRPGRGEPRFISVGYVDDTQFVREDSDAASPRGEPRAPWVEQEGPEYWDRETQNYKRQ |
| | AQADRVSLRNLRGAYNQSEDGSHTLQRMYGCDLGPDGRLLRGYDQSAYDGKDYIALNEDLRSWTAADTAA |
| | QITQRKLEAARAAEQLRAYLEGTCVEWLRRYLENGKETLQRAEPPKTHVTHHPLSDHEATLRCWALGEYP |
| | AEITLTWQRDGEDQTQDTELVETRPAGDGTFQKWAAVVVPSGQEQRYTCHMQHEGLQEPLTLSWEPSS |
| 453 | CSHSMRYFDTAVSRPGRGEPRFISVGYVDDTQFVREDSDAASPRGEPRAPWVEQEGPEYWDRETQKYKRQ |
| | AQADRVSLRNLRGAYNQSEDGSHTLQRMSGCDLGPDGRLLRGYDQSAYDGKDYIALNEDLRSWTAADTAA |
| | QITQRKLEAARAAEQLRAYLEGTCVEWLRRYLENGKETLQRAEPPKTHVTHHPLSDHEATLRCWALGEYP |
| | AEITLTWQRDGEDQTQDTELVETRPAGDGTFQKWAAVVVPSGQEQRYTCHMQHEGLQEPLTLSWEPSS |
| 454 | CSHSMRYFYTAVSRPGRGEPRFIAVGYVDDTQFVREDSDAASPRGEPRAPWVEQEGPEYWDRETQKYKRQ |
| | AQTDRVSLRNLRGAYNQSEAGSHTLQWMYGCDLGPDGRLLRGYDQSAYDGKDYIALNEDLRSWTAADTAA |
| | QITQRKWEAARAAEQQRAYLEGTCVEWLRRYLENGKETLQRAEHPKTHVTHHLVSDHEATLRCWALGEYP |
| | AEITLTWQRDGEDQTQDTELVETRPAGDGTFQKWAAVVVPSGEEQRYTCHVQHEGLPEPLTLRWEPSS |
| 455 | GSHSLKYFHTSVSRPGRGEPRFISVGYVDDTQFVRFDNDAASPRMVPRAPWMEQEGSEYWDRETRSARDT |
| | AQIFRVNLRTLRGAYNQSEAGSHTLQWMHGCELGPDGRFLRGYEQFAYDGKDYLTLNEDLRSWTAVDTAA |
| | QISEQKSNDASEAEHQRAYLEDTCVEWLHKYLEKGKETLLHLEPPKTHVTHHPISDHEATLRCWALGEYP |
| | AEITLTWQQDGEGHTQDTELVETRPAGDGTFQKWAAVVVPSGEEQRYTCHVQHEGLPEPVTLRWKPAS |

[0092] The HLA polypeptide of the HLA-antigen polypeptide complex can be encoded by a nucleic acid of any set forth in Table 7. In some embodiments, the HLA polypeptide is encoded by a nucleic acid sequence that is at least about 90%, 95%, 97%, 98%, 99%, or 100% homologous to at least, but not limited to, any one of the nucleic acid sequences listed in Table 7, such as SEQ ID NOs: 456 to 484. In some embodiments, the HLA polypeptide is encoded by a nucleic acid sequence identical to that set forth in any one of SEQ ID NOs: 456 to 484.

TABLE 7
HLA Allele Nucleic Acid Sequences

| SEQ ID NO: | DNA sequence |
|---|---|
| 456 | ggctcccactccatgaggtatttcttcacatccgtgtcccggcccggccgcggggagccccgc |
| | ttcatcgccgtgggctacgtggacgacacgcagttcgtgcggttcgacagcgacgccgcgagc |
| | cagaagatggagccgcgggcgccgtggatagagcaggaggggccggagtattgggaccaggag |
| | acacggaatatgaaggcccactcacagactgaccgagcgaacctggggaccdgcgcggcgcct |
| | acaaccagagcgaggacggttctcacaccatccagataatgtatggctgcgacgtggggccgg |
| | acgggcgcttcctccgcgggtaccggcaggacgcctacgacggcaaggattacatcgccctga |
| | acgaggacctgcgctcttggaccgcggcggacatggcagctcagatcaccaagcgcaagtggg |
| | aggcggtccatgcggcggagcagcggagagtctacctggagggccggtgcgtggacgggctcc |
| | gcagatacctggagaacgggaaggagacactgcagcgcacggacccccccaagacacatatga |
| | cccaccaccccatctctgaccatgaggccaccctgaggtgctgggccctgggcttctaccctg |
| | cggagatcacactgacctggcagcgggatggggaggaccagacccaggacacggagctcgtgg |
| | agaccaggcctgcaggggatggaaccttccagaagtgggcggctgtggtggtgccttctggag |
| | aggagcagagatacacctgccatgtgcagcatgagggtctgcccaagcccctcaccctgagat |
| | gggagctgtcttcc |
| 457 | ggctcccactccatgaggtatttcttcacatccgtgtcccggcccggccgcggggagccccgc |
| | ttcatcgccgtgggctacgtggacgacacgcagttcgtgcggttcgacagcgacgccgcgagc |
| | cagaggatggagccgcgggcgccgtggatagagcaggaggggccggagtattgggaccaggag |
| | acacggaatgtgaaggcccagtcacagactgaccgagtggacctggggaccctgcgcggcgcc |
| | tacaaccagagcgaggccggttctcacaccatccagataatgtatggctgcgacgtggggtcg |
| | gacgggcgcttcctccgcgggtaccggcaggacgcctacgacggcaaggattacatcgccctg |
| | aacgaggacctgcgctcttggaccgcggcggacatggcggctcagatcaccaagcgcaagtgg |
| | gaggcggcccatgaggcggagcagttgagagcctacctggatggcacgtgcgtggagtggctc |
| | cgcagatacctggagaacgggaaggagacactgcagcgcacggacccccccaagacacatatg |
| | acccaccaccccatctctgaccatgaggccaccctgaggtgctgggccctgggcttctaccct |
| | gcggagatcacactgacctggcagcgggatggggaggaccagacccaggacacggagctcgtg |
| | gagaccaggcctgcaggggatggaaccttccagaagtgggcggctgtggtggtgccttctgga |
| | gaggagcagagatacacctgccatgtgcagcatgagggtctgcccaagcccctcaccctgaga |
| | tgggagctgtcttcc |
| 458 | ggctcccactccatgaggtatttctacacctccgtgtcccggcccggccgcggggagccccgc |
| | ttcatcgccgtgggctacgtggacgacacgcagttcgtgcggttcgacagcgacgccgcgagc |
| | cagaggatggagccgcgggcgccgtggatagagcaggaggggccggagtattgggaccaggag |
| | acacggaatgtgaaggcccagtcacagactgaccgagtggacctggggaccctgcgcggcgcc |
| | tacaaccagagcgaggacggttctcacaccatccagataatgtatggctgcgacgtggggccg |
| | gacgggcgcttcctccgcgggtaccggcaggacgcctacgacggcaaggattacatcgccctg |
| | aacgaggacctgcgctcttggaccgcggcggacatggcagctcagatcaccaagcgcaagtgg |
| | gaggcggcccatgcggcggagcagcagagagcctacctggagggccggtgcgtggagtggctc |
| | cgcagatacctggagaacgggaaggagacactgcagcgcacggacccccccaagacacatatg |
| | acccaccaccccatctctgaccatgaggccaccctgaggtgctgggccctgggcttctaccct |
| | gcggagatcacactgacctggcagcgggatggggaggaccagacccaggacacggagctcgtg |
| | gagaccaggcctgcaggggatggaaccttccagaagtgggcggctgtggtggtgccttctgga |
| | gaggagcagagatacacctgccatgtgcagcatgagggtctgcccaagcccctcaccctgaga |
| | tgggagctgtcttcc |
| 459 | ggctcccactccatgaggtatttctccacatccgtgtcccggcccggccgcggggagccccgc |
| | ttcatcgccgtgggctacgtggacgacacgcagttcgtgcggttcgacagcgacgccgcgagc |
| | cagaggatggagccgcgggcgccgtggatagagcaggaggggccggagtattgggacgaggag |
| | acagggaaagtgaaggcccactcacagactgaccgagagaacctgcggatcgcgctccgcgcc |
| | tacaaccagagcgaggccggttctcacaccctccagatgatgtttggctgcgacgtggggtcg |
| | gacgggcgcttcctccgcgggtaccaccagtacgcctacgacggcaaggattacatcgccctg |
| | aaagaggacctgcgctcttggaccgcggcggacatggcggctcagatcacccagcgcaagtgg |
| | gaggcggcccgtgtggcggagcagttgagagcctacctggagggcacgtgcgtggacgggctc |
| | cgcagatacctggagaacgggaaggagacactgcagcgcacggacccccccaagacacatatg |
| | acccaccaccccatctctgaccatgaggccactctgagatgctgggccctgggcttctaccct |
| | gcggagatcacactgacctggcagcgggatggggaggaccagacccaggacacggagcttgtg |
| | gagaccaggcctgcaggggatggaaccttccagaagtgggcagctgtggtggtaccttctgga |
| | gaggagcagagatacacctgccatgtgcagcatgagggtctgcccaagcccctcaccctgaga |
| | tgggagccatcttcc |
| 460 | ggctcccactccatgaggtatttctccacatccgtgtcccggcccggccgcggggagccccgc |
| | ttcatcgccgtgggctacgtggacgacacgcagttcgtgcggttcgacagcgacgccgcgagc |
| | cagaggatggagccgcgggcgccgtggatagagcaggaggggccggagtattgggacgaggag |
| | acagggaaagtgaaggcccactcacagactgaccgagagaacctgcggatcgcgctccgcgcc |
| | tacaaccagagcgaggccggttctcacaccctccagatgatgtttggctgcgacgtggggtcg |
| | gacgggcgcttcctccgcgggtaccaccagtacgcctacgacggcaaggattacatcgccctg |
| | aaagaggacctgcgctcttggaccgcggcggacatggcggctcagatcaccaagcgcaagtgg |
| | gaggcggcccatgtggcggagcagcagagagcctacctggagggcacgtgcgtggacgggctc |
| | cgcagatacctggagaacgggaaggagacactgcagcgcacggacccccccaagacacatatg |
| | acccaccaccccatctctgaccatgaggccactctgagatgctgggccctgggcttctaccct |
| | gcggagatcacactgacctggcagcgggatggggaggaccagacccaggacacggagcttgtg |
| | gagaccaggcctgcaggggatggaaccttccagaagtgggcagctgtggtggtaccttctgga |
| | gaggagcagagatacacctgccatgtgcagcatgagggtctgcccaagcccctcaccctgaga |
| | tgggagccatcttcc |
| 461 | ggctcccactccatgaggtatttctccacatccgtgtcccggcccggcagtggagagccccgc |
| | ttcatcgcagtgggctacgtggacgacacgcagttcgtgcggttcgacagcgacgccgcgagc |
| | cagaggatggagccgcgggcgccgtggatagagcaggagaggcctgagtattgggaccaggag |
| | acacggaatgtgaaggcccagtcacagactgaccgagtggacctggggaccctgcgcggcgcc |
| | tacaaccagagcgaggccggttctcacaccatccagataatgtatggctgcgacgtggggtcg |
| | gacgggcgcttcctccgcgggtatgaacagcacgcctacgacggcaaggattacatcgccctg |
| | aacgaggacctgcgctcttggaccgcggcggacatggcggctcagatcacccagcgcaagtgg |
| | gaggcggcccgttgggcggagcagttgagagcctacctggagggcacgtgcgtggagtggctc |
| | cgcagatacctggagaacgggaaggagacactgcagcgcacggacccccccaagacacatatg |
| | acccaccaccccatctctgaccatgaggccaccctgaggtgctgggccctgggcttctaccct |
| | gcggagatcacactgacctggcagcgggatggggaggaccagacccaggacacggagctcgtg |
| | gagaccaggcctgcaggggatggaaccttccagaagtgggcggctgtggtggtgccttctgga |
| | gaggagcagagatacacctgccatgtgcagcatgagggtctgcccaagcccctcaccctgaga |
| | tgggagctgtcttcc |
| 462 | ggctcccactccatgaggtatttcaccacatccgtgtcccggcccggccgcggggagccccgc |
| | ttcatcgccgtgggctacgtggacgacacgcagttcgtgcggttcgacagcgacgccgcgagc |
| | cagaggatggagccgcgggcgccgtggatagagcaggagaggcctgagtattgggaccaggag |
| | acacggaatgtgaaggcccactcacagattgaccgagtggacctggggaccctgcgcggcgcc |
| | tacaaccagagcgaggccggttctcacaccatccagatgatgtatggctgcgacgtggggtcg |
| | gacgggcgcttcctccgcgggtaccagcaggacgcctacgacggcaaggattacatcgccttg |
| | aacgaggacctgcgctcttggaccgcggcggacatggcggctcagatcacccagcgcaagtgg |
| | gaggcggcccgtgtggcggagcagttgagagcctacctggagggcacgtgcgtggagtggctc |
| | cgcagatacctggagaacgggaaggagacactgcagcgcacggacccccccaagacgcatatg |
| | actcaccacgctgtctctgaccatgaggccaccctgaggtgctgggccctgagcttctaccct |
| | gcggagatcacactgacctggcagcgggatggggaggaccagacccaggacacggagctcgtg |
| | gagaccaggcctgcaggggatggaaccttccagaagtgggcgtctgtggtggtgccttctgga |
| | caggagcagagatacacctgccatgtgcagcatgagggtctccccaagcccctcaccctgaga |
| | tgggagccgtcttcc |
| 463 | ggctcccactccatgaggtatttcaccacatccgtgtcccggcccggccgcggggagccccgc |
| | ttcatcgccgtgggctacgtggacgacacgcagttcgtgcggttcgacagcgacgccgcgagc |
| | cagaggatggagccgcgggcgccgtggatagagcaggaggggccggagtattgggaccggaac |
| | acacggaatgtgaaggcccactcacagattgaccgagtggacctggggaccctgcgcggcgcc |
| | tacaaccagagcgaggccggttctcacaccatccagatgatgtatggctgcgacgtggggtcg |
| | gacgggcgcttcctccgcgggtaccagcaggacgcctacgacggcaaggattacatcgccttg |
| | aacgaggacctgcgctcttggaccgcggcggacatggcggctcagatcacccagcgcaagtgg |
| | gaggcggcccgtgtggcggagcagttgagagcctacctggagggcacgtgcgtggagtggctc |
| | cgcagatacctggagaacgggaaggagacactgcagcgcacggacccccccaagacgcatatg |
| | actcaccacgctgtctctgaccatgaggccaccctgaggtgctgggccctgagcttctaccct |
| | gcggagatcacactgacctggcagcgggatggggaggaccagacccaggacacggagctcgtg |
| | gagaccaggcctgcaggggatggaaccttccagaagtgggcgtctgtggtggtgccttctgga |
| | caggagcagagatacacctgccatgtgcagcatgagggtctccccaagcccctcaccctgaga |
| | tgggagccgtcttcc |
| 464 | ggctcccactccatgaggtatttctacacctccatgtcccggcccggccgcggggagccccgc |
| | ttcatcgccgtgggctacgtggacgacacgcagttcgtgcggttcgacagcgacgccgcgagc |
| | cagaggatggagccgcgggcgccgtggatagagcaggaggggccggagtattgggaccggaac |
| | acacggaatgtgaaggcccagtcacagactgaccgagtggacctggggaccctgcgcggcgcc |
| | tacaaccagagcgaggccggttctcacaccatccagaggatgtatggctgcgacgtggggccg |
| | gacgggcgcttcctccgcgggtaccaccagtacgcctacgacggcaaggattacatcgccctg |
| | aaagaggacctgcgctcttggaccgcggcggacatggcagctcagaccaccaagcacaagtgg |
| | gaggcggcccatgtggcggagcagtggagagcctacctggagggcacgtgcgtggagtggctc |
| | cgcagatacctggagaacgggaaggagacactgcagcgcacggacgcccccaaaacgcatatg |
| | actcaccacgctgtctctgaccatgaagccaccctgaggtgctgggccctgagcttctaccct |
| | gcggagatcacactgacctggcagcgggatggggaggaccagacccaggacacggagctcgtg |
| | gagaccaggcctgcaggggatggaaccttccagaagtgggtggctgtggtggtgccttctgga |
| | caggagcagagatacacctgccatgtgcagcatgagggtttgcccaagcccctcaccctgaga |
| | tgggagccgtcttcc |
| 465 | ggctcccactccatgaggtatttctacacctccgtgtcccggcccggccgcggggagccccgc |
| | ttcatctcagtgggctacgtggacgacacccagttcgtgaggttcgacagcgacgccgcgagt |
| | ccgagagaggagccgcgggcgccgtggatagagcaggaggggccggagtattgggaccggaac |
| | acacagatctacaaggcccaggcacagactgaccgagagagcctgcggaacctgcgcggcgcc |
| | tacaaccagagcgaggccgggtctcacaccctccagagcatgtacggctgcgacgtggggccg |
| | gacgggcgcctcctccgcgggcatgaccagtacgcctacgacggcaaggattacatcgccctg |
| | aacgaggacctgcgctcctggaccgccgcggacacggcggctcagatcacccagcgcaagtgg |
| | gaggcggcccgtgaggcggagcagcggagagcctacctggagggcgagtgcgtggagtggctc |
| | cgcagatacctggagaacgggaaggacaagctggagcgcgctgaccccccaaagacacacgtg |
| | acccaccaccccatctctgaccatgaggccaccctgaggtgctgggccctgggtttctaccct |
| | gcggagatcacactgacctggcagcgggatggcgaggaccaaactcaggacactgagcttgtg |
| | gagaccagaccagcaggagatagaaccttccagaagtgggcagctgtggtggtgccttctgga |
| | gaagagcagagatacacatgccatgtacagcatgaggggctgccgaagcccctcaccctgaga |
| | tgggagccgtcttcc |
| 466 | ggctcccactccatgaggtatttcgacaccgccatgtcccggcccggccgcggggagccccgc |
| | ttcatctcagtgggctacgtggacgacacgcagttcgtgaggttcgacagcgacgccgcgagt |
| | ccgagagaggagccgcgggcgccgtggatagagcaggaggggccggagtattgggaccggaac |
| | acacagatcttcaagaccaacacacagactgaccgagagagcctgcggaacctgcgcggcgcc |
| | tacaaccagagcgaggccgggtctcacaccctccagagcatgtacggctgcgacgtggggccg |
| | gacgggcgcctcctccgcgggcataaccagtacgcctacgacggcaaggattacatcgccctg |
| | aacgaggacctgcgctcctggaccgcggcggacaccgcggctcagatcacccagcgcaagtgg |
| | gaggcggcccgtgtggcggagcaggacagagcctacctggagggcacgtgcgtggagtggctc |
| | cgcagatacctggagaacgggaaggacacgctggagcgcgcggaccccccaaagacacacgtg |
| | acccaccaccccatctctgaccatgaggccaccctgaggtgctgggccctgggcttctaccct |
| | gcggagatcacactgacctggcagcgggatggcgaggaccaaactcaggacactgagcttgtg |
| | gagaccagaccagcaggagatagaaccttccagaagtgggcagctgtggtggtgccttctgga |
| | gaagagcagagatacacatgccatgtacagcatgaggggctgccgaagcccctcaccctgaga |
| | tgggagccgtcttcc |
| 467 | ggctcccactccatgaggtatttctacaccgccatgtcccggcccggccgcggggagccccgc |
| | ttcatcgcagtgggctacgtggacgacacccagttcgtgaggttcgacagcgacgccgcgagt |
| | ccgaggatggcgccccgggcgccatggatagagcaggaggggccggagtattgggaccgggag |
| | acacagatctccaagaccaacacacagacttaccgagagagcctgcggaacctgcgcggcgcc |
| | tacaaccagagcgaggccgggtctcacaccctccagaggatgtacggctgcgacgtggggccg |
| | gacgggcgcctcctccgcgggcatgaccagtccgcctacgacggcaaggattacatcgccctg |
| | aacgaggacctgagctcctggaccgcggcggacacggcggctcagatcacccagcgcaagtgg |
| | gaggcggcccgtgaggcggagcagtggagagcctacctggagggcctgtgcgtggagtggctc |
| | cgcagatacctggagaacgggaaggagacactgcagcgcgcggaccccccaaagacacatgtg |
| | acccaccaccccatctctgaccatgaggccaccctgaggtgctgggccctgggcttctaccct |
| | gcggagatcacactgacctggcagcgggatggcgaggaccaaactcaggacaccgagcttgtg |
| | gagaccagaccagcaggagatagaaccttccagaagtgggcagctgtggtggtgccttctgga |
| | gaagagcagagatacacatgccatgtacagcatgaggggctgccgaagcccctcaccctgaga |
| | tgggagccatcttcc |
| 468 | ggctcccactccatgaggtatttccacaccgccatgtcccggcccggccgcggggagccccgc |
| | ttcatcaccgtgggctacgtggacgacacgctgttcgtgaggttcgacagcgacgccacgagt |
| | ccgaggaaggagccgcgggcgccatggatagagcaggaggggccggagtattgggaccgggag |
| | acacagatctccaagaccaacacacagacttaccgagagagcctgcggaacctgcgcggcgcc |
| | tacaaccagagcgaggccgggtctcacaccctccagaggatgtacggctgcgacgtggggccg |
| | gacgggcgcctcctccgcgggcataaccagtacgcctacgacggcaaggattacatcgccctg |
| | aacgaggacctgcgctcctggaccgccgcggacacggcggctcagatctcccagcgcaagttg |
| | gaggcggcccgtgtggcggagcagctgagagcctacctggagggcgagtgcgtggagtggctc |
| | cgcagatacctggagaacgggaaggacaagctggagcgcgctgaccccccaaagacacacgtg |
| | acccaccaccccatctctgaccatgaggccaccctgaggtgctgggccctgggtttctaccct |
| | gcggagatcacactgacctggcagcgggatggcgaggaccaaactcaggacactgagcttgtg |
| | gagaccagaccagcaggagatagaaccttccagaagtgggcagctgtggtggtgccttctgga |
| | gaagagcagagatacacatgccatgtacagcatgaggggctgccgaagcccctcaccctgaga |
| | tgggagccgtcttcc |
| 469 | ggctcccactccatgaggtatttccacacctccgtgtcccggcccggccgcggggagccccgc |
| | ttcatcaccgtgggctacgtggacgacacgctgttcgtgaggttcgacagcgacgccacgagt |
| | ccgaggaaggagccgcgggcgccatggatagagcaggaggggccggagtattgggaccgggag |
| | acacagatctccaagaccaacacacagacttaccgagagagcctgcggaacctgcgcggcgcc |
| | tacaaccagagcgaggccgggtctcacaccctccagagcatgtacggctgcgacgtggggccg |
| | gacgggcgcctcctccgcgggcataaccagtacgcctacgacggcaaggattacatcgccctg |
| | aacgaggacctgcgctcctggaccgccgcggacacggcggctcagatcacccagcgcaagtgg |
| | gaggcggcccgtgtggcggagcagctgagagcctacctggagggcgagtgcgtggagtggctc |
| | cgcagatacctggagaacgggaaggagacactgcagcgcgcggaccccccaaagacacacgtg |
| | acccaccaccccatctctgaccatgaggccaccctgaggtgctgggccctgggcttctaccct |
| | gcggagatcacactgacctggcagcgggatggcgaggaccaaactcaggacactgagcttgtg |
| | gagaccagaccagcaggagatagaaccttccagaagtgggcagctgtggtggtgccttctgga |
| | gaagagcagagatacacatgccatgtacagcatgaggggctgccgaagcccctcaccctgaga |
| | tgggagccgtcttcc |
| 470 | ggctcccactccatgaggtatttctacaccgccatgtcccggcccggccgcggggagccccgc |
| | ttcatcaccgtgggctacgtggacgacacgctgttcgtgaggttcgacagcgacgccacgagt |
| | ccgaggaaggagccgcgggcgccatggatagagcaggaggggccggagtattgggaccgggag |
| | acacagatctccaagaccaacacacagacttaccgagagaacctgcgcaccgcgctccgcgcc |
| | tacaaccagagcgaggccgggtctcacatcatccagaggatgtacggctgcgacgtggggccg |
| | gacgggcgcctcctccgcgggtatgaccaggacgcctacgacggcaaggattacatcgccctg |
| | aacgaggacctgagctcctggaccgcggcggacaccgcggctcagatcacccagcgcaagtgg |
| | gaggcggcccgtgtggcggagcaggacagagcctacctggagggcctgtgcgtggagtcgctc |
| | cgcagatacctggagaacgggaaggagacactgcagcgcgcggaccccccaaagacacatgtg |
| | acccaccaccccatctctgaccatgaggtcaccctgaggtgctgggccctgggcttctaccct |
| | gcggagatcacactgacctggcagcgggatggcgaggaccaaactcaggacaccgagcttgtg |
| | gagaccagaccagcaggagatagaaccttccagaagtgggcagctgtggtggtgccttctgga |
| | gaagagcagagatacacatgccatgtacagcatgaggggctgccgaagcccctcaccctgaga |
| | tgggagccgtcttcc |
| 471 | ggctcccactccatgaggtatttctacaccgccatgtcccggcccggccgcggggagccccgc |
| | ttcatcaccgtgggctacgtggacgacacgctgttcgtgaggttcgacagcgacgccacgagt |
| | ccgaggaaggagccgcgggcgccatggatagagcaggaggggccggagtattgggaccgggag |
| | acacagatctccaagaccaacacacagacttaccgagagaacctgcgcaccgcgctccgcgcc |
| | tacaaccagagcgaggccgggtctcacatcatccagaggatgtacggctgcgacgtggggccg |
| | gacgggcgcctcctccgcgggtatgaccaggacgcctacgacggcaaggattacatcgccctg |
| | aacgaggacctgagctcctggaccgcggcggacaccgcggctcagatcacccagcgcaagtgg |
| | gaggcggcccgtgtggcggagcagctgagagcctacctggagggcctgtgcgtggagtcgctc |
| | cgcagatacctggagaacgggaaggagacactgcagcgcgcggaccccccaaagacacatgtg |
| | acccaccaccccatctctgaccatgaggtcaccctgaggtgctgggccctgggcttctaccct |
| | gcggagatcacactgacctggcagcgggatggcgaggaccaaactcaggacaccgagcttgtg |
| | gagaccagaccagcaggagatagaaccttccagaagtgggcagctgtggtggtgccttctgga |
| | gaagagcagagatacacatgccatgtacagcatgaggggctgccgaagcccctcaccctgaga |
| | tgggagccgtcttcc |
| 472 | ggctcccactccatgaggtatttctacaccgccatgtcccggcccggccgcggggagccccgc |
| | ttcattgcagtgggctacgtggacgacacccagttcgtgaggttcgacagcgacgccgcgagt |
| | ccgaggacggagccccgggcgccatggatagagcaggaggggccggagtattgggaccggaac |
| | acacagatcttcaagaccaacacacagacttaccgagagaacctgcggatcgcgctccgcgcc |
| | tacaaccagagcgaggccgggtctcacacttggcagacgatgtatggctgcgacgtggggccg |
| | gacgggcgcctcctccgcgggcataaccagtacgcctacgacggcaaagattacatcgccctg |
| | aacgaggacctgagctcctggaccgcggcggacaccgcggctcagatcacccagcgcaagtgg |
| | gaggcggcccgtgaggcggagcagctgagagcctacctggagggcctgtgcgtggagtggctc |
| | cgcagacacctggagaacgggaaggagacactgcagcgcgcggaccccccaaagacacacgtg |
| | acccaccacccagtctctgaccatgaggccaccctgaggtgctgggccctgggcttctaccct |
| | gcggagatcacactgacctggcagcgggatggcgaggaccaaactcaggacactgagcttgtg |
| | gagaccagaccagcaggagatagaaccttccagaagtgggcagctgtggtggtgccttctgga |
| | gaagagcagagatacacatgccatgtacagcatgaggggctgccgaagcccctcaccctgaga |
| | tgggagccatcttcc |
| 473 | ggctcccactccatgaggtatttctacaccgccatgtcccggcccggccgcggggagccccgc |
| | ttcatcgcagtgggctacgtggacgacacccagttcgtgaggttcgacagcgacgccgcgagt |
| | ccgaggacggagccccgggcgccatggatagagcaggaggggccggagtattgggaccggaac |
| | acacagatcttcaagaccaacacacagacttaccgagagaacctgcggatcgcgctccgcgcc |
| | tacaaccagagcgaggccgggtctcacatcatccagaggatgtatggctgcgacctggggccc |
| | gacgggcgcctcctccgcgggcatgaccagtccgcctacgacggcaaggattacatcgccctg |
| | aacgaggacctgagctcctggaccgcggcggacaccgcggctcagatcacccagcgcaagtgg |
| | gaggcggcccgtgtggcggagcagctgagagcctacctggagggcctgtgcgtggagtggctc |
| | cgcagatacctggagaacgggaaggagacactgcagcgcgcggaccccccaaagacacacgtg |
| | acccaccacccagtctctgaccatgaggccaccctgaggtgctgggccctgggcttctaccct |
| | gcggagatcacactgacctggcagcgggatggcgaggaccaaactcaggacactgagcttgtg |
| | gagaccagaccagcaggagatagaaccttccagaagtgggcagctgtggtggtgccttctgga |
| | gaagagcagagatacacatgccatgtacagcatgaggggctgccgaagcccctcaccctgaga |
| | tgggagccatcttcc |
| 474 | ggctcccactccatgaggtatttctacaccgccatgtcccggcccggccgcggggagccccgc |
| | ttcatcgcagtgggctacgtggacgacacccagttcgtgaggttcgacagcgacgccgcgagt |
| | ccgaggacggagccccgggcgccatggatagagcaggaggggccggagtattgggacggggag |
| | acacggaacatgaaggcctccgcgcagacttaccgagagaacctgcggatcgcgctccgcgcc |
| | tacaaccagagcgaggccgggtctcacatcatccagaggatgtatggctgcgacctggggccc |
| | gacgggcgcctcctccgcgggcatgaccagtccgcctacgacggcaaggattacatcgccctg |
| | aacgaggacctgagctcctggaccgcggcggacaccgcggctcagatcacccagcgcaagtgg |
| | gaggcggcccgtgtggcggagcagctgagagcctacctggagggcctgtgcgtggagtggctc |
| | cgcagatacctggagaacgggaaggagacactgcagcgcgcggaccccccaaagacacacgtg |
| | acccaccacccagtctctgaccatgaggccaccctgaggtgctgggccctgggcttctaccct |
| | gcggagatcacactgacctggcagcgggatggcgaggaccaaactcaggacactgagcttgtg |
| | gagaccagaccagcaggagatagaaccttccagaagtgggcagctgtggtggtgccttctgga |
| | gaagagcagagatacacatgccatgtacagcatgaggggctgccgaagcccctcaccctgaga |
| | tgggagccatcttcc |
| 475 | tgctcccactccatgaagtatttcttcacatccgtgtcccggcctggccgcggagagccccgc |
| | ttcatctcagtgggctacgtggacgacacgcagttcgtgcggttcgacagcgacgccgcgagt |
| | ccgagaggggagccgcgggcgccgtgggtggagcaggaggggccggagtattgggaccgggag |
| | acacagaagtacaagcgccaggcacagactgaccgagtgagcctgcggaacctgcgcggcgcc |
| | tacaaccagagcgaggccgggtctcacaccctccagtggatgtgtggctgcgacctggggccc |
| | gacgggcgcctcctccgcgggtatgaccagtacgcctacgacggcaaggattacatcgccctg |
| | aacgaggacctgcgctcctggaccgccgcggacaccgcggctcagatcacccagcgcaagtgg |
| | gaggcggcccgtgaggcggagcagcggagagcctacctggagggcacgtgcgtggagtggctc |
| | cgcagatacctggagaacgggaaggagacactgcagcgcgcggaacacccaaagacacacgtg |
| | acccaccatccagtctctgaccatgaggccaccctgaggtgctgggccctgggcttctaccct |
| | gcggagatcacactgacctggcagtgggatggggaggaccaaactcaggacaccgagcttgtg |
| | gagaccaggccagcaggagatggaaccttccagaagtgggcagctgtgatggtgccttctgga |
| | gaagagcagagatacacgtgccatgtgcagcacgaggggctgccggagcccctcaccctgaga |
| | tgggagccgtcttcc |
| 476 | tgctcccactccatgaggtatttctacaccgctgtgtcccggcccagccgcggagagccccac |
| | ttcatcgcagtgggctacgtggacgacacgcagttcgtgcggttcgacagcgacgccgcgagt |
| | ccaagaggggagccgcgggcgccgtgggtggagcaggaggggccggagtattgggaccgggag |
| | acacagaagtacaagcgccaggcacagactgaccgagtgaacctgcggaaactacgcggcgcc |
| | tacaaccagagcgaggccgggtctcacaccctccagaggatgtacggctgcgacctggggccc |
| | gacgggcgcctcctccgcgggtatgaccagtccgcctacgacggcaaggattacatcgccctg |
| | aacgaggacctgcgctcctggaccgccgcggacacagcggctcagatcacccagcgcaagtgg |
| | gaggcggcccgtgaggcggagcagtggagagcctacctggagggcgagtgcgtggagtggctc |
| | cgcagatacctggagaacgggaaggagacactgcagcgcgcggaacacccaaagacacacgtg |
| | acccaccatccagtctctgaccatgaggccaccctgaggtgctgggccctgggcttctaccct |
| | acggagatcacactgacctggcagcgggatggcgaggaccaaactcaggacaccgagcttgtg |
| | gagaccaggccagcaggagatggaaccttccagaagtgggcagctgtggtggtgccttctgga |
| | gaagagcagagatacacgtgccatgtgcagcacgaggggctgccggagcccctcaccctgaga |
| | tgggagccatcttcc |
| 477 | ggctcccactccatgaggtatttctacaccgctgtgtcccggcccggccgcggggagccccac |
| | ttcatcgcagtgggctacgtggacgacacgcagttcgtgcggttcgacagcgacgccgcgagt |
| | ccgagaggggagccgcgggcgccgtgggtggagcaggaggggccggagtattgggaccgggag |
| | acacagaagtacaagcgccaggcacagactgaccgagtgagcctgcggaacctgcgcggcgcc |
| | tacaaccagagcgaggccgggtctcacatcatccagaggatgtatggctgcgacgtggggccc |
| | gacgggcgcctcctccgcgggtatgaccagtacgcctacgacggcaaggattacatcgccctg |
| | aacgaggatctgcgctcctggaccgccgcggacacggcggctcagatcacccagcgcaagtgg |
| | gaggcggcccgtgaggcggagcagctgagagcctacctggagggcctgtgcgtggagtggctc |
| | cgcagatacctgaagaatgggaaggagacactgcagcgcgcggaacacccaaagacacacgtg |
| | acccaccatccagtctctgaccatgaggccaccctgaggtgctgggccctgggcttctaccct |
| | gcggagatcacactgacctggcagtgggatggggaggaccaaactcaggacactgagcttgtg |
| | gagaccaggccagcaggagatggaaccttccagaagtgggcagctgtggtggtgccttctgga |
| | gaagagcagagatacacgtgccatgtgcagcacgaggggctgccggagcccctcaccctgaga |
| | tgggagccgtcttcc |
| 478 | ggctcccactccatgaggtatttctccacatccgtgtcctggcccggccgcggggagccccgc |
| | ttcatcgcagtgggctacgtggacgacacgcagttcgtgcggttcgacagcgacgccgcgagt |
| | ccaagaggggagccgcgggagccgtgggtggagcaggaggggccggagtattgggaccgggag |
| | acacagaagtacaagcgccaggcacaggctgaccgagtgaacctgcggaaactgcgcggcgcc |
| | tacaaccagagcgaggacgggtctcacaccctccagaggatgtttggctgcgacctggggccg |
| | gacgggcgcctcctccgcgggtataaccagttcgcctacgacggcaaggattacatcgccctg |
| | aacgaggatctgcgctcctggaccgccgcggacacggcggctcagatcacccagcgcaagtgg |
| | gaggcggcccgtgaggcggagcagcggagagcctacctggagggcacgtgcgtggagtggctc |
| | cgcagatacctggagaacgggaaggagacactgcagcgcgcggaacacccaaagacacacgtg |
| | acccaccatccagtctctgaccatgaggccaccctgaggtgctgggccctgggcttctaccct |
| | gcggagatcacactgacctggcagtgggatggggaggaccaaactcaggacaccgagcttgtg |
| | gagaccaggccagcaggagatggaaccttccagaagtgggcagctgtggtggtgccttctgga |
| | gaagagcagagatacacgtgccatgttcagcacgaggggctgccggagcccctcaccctgaga |
| | tggaagccgtcttcc |
| 479 | tgctcccactccatgaggtatttctacaccgccgtgtcccggcccggccgcggagagccccgc |
| | ttcatcgcagtgggctacgtggacgacacgcagttcgtgcagttcgacagcgacgccgcgagt |
| | ccaagaggggagccgcgggcgccgtgggtggagcaggaggggccggagtattgggaccgggag |
| | acacagaagtacaagcgccaggcacagactgaccgagtgaacctgcggaaactgcgcggcgcc |
| | tacaaccagagcgaggccgggtctcacaccctccagaggatgtatggctgcgacctggggccc |
| | gacgggcgcctcctccgcgggtataaccagttcgcctacgacggcaaggattacatcgccctg |
| | aatgaggacctgcgctcctggaccgccgcggacaaggcggctcagatcacccagcgcaagtgg |
| | gaggcggcccgtgaggcggagcagcggagagcctacctggagggcacgtgcgtggagtggctc |
| | cgcagatacctggagaacgggaagaagacgctgcagcgcgcggaacacccaaagacacacgtg |
| | acccaccatccagtctctgaccatgaggccaccctgaggtgctgggccctgggcttctaccct |
| | gcggagatcacactgacctggcagcgggatggcgaggaccaaactcaggacaccgagcttgtg |
| | gagaccaggccagcaggagatggaaccttccagaagtgggcagctgtggtggtgccttctgga |
| | gaagagcagagatacacgtgccatgtgcagcacgaggggctgccagagcccctcaccctgaga |
| | tgggggccatcttcc |
| 480 | tgctcccactccatgaggtatttcgacaccgccgtgtcccggcccggccgcggagagccccgc |
| | ttcatctcagtgggctacgtggacgacacgcagttcgtgcggttcgacagcgacgccgcgagt |
| | ccgagaggggagccccgggcgccgtgggtggagcaggaggggccggagtattgggaccgggag |
| | acacagaagtacaagcgccaggcacaggctgaccgagtgaacctgcggaaactgcgcggcgcc |
| | tacaaccagagcgaggacgggtctcacaccctccagtggatgtatggctgcgacctggggccc |
| | gacgggcgcctcctccgcgggtatgaccagtccgcctacgacggcaaggattacatcgccctg |
| | aacgaggacctgcgctcctggaccgccgcggacacggcggctcagatcacccagcgcaagtgg |
| | gaggcggcccgtgaggcggagcagtggagagcctacctggagggcacgtgcgtggagtggctc |
| | cgcagatacctggagaacgggaaggagacactgcagcgcgcggaacacccaaagacacacgtg |
| | acccaccatccagtctctgaccatgaggccaccctgaggtgctgggccctgggcttctaccct |
| | gcggagatcacactgacctggcagcgggatggcgaggaccaaactcaggacaccgagcttgtg |
| | gagaccaggccagcaggagatggaaccttccagaagtgggcagctgtggtggtgccttctgga |
| | gaagagcagagatacacgtgccatgtgcagcacgaggggctgccagagcccctcaccctgaga |
| | tgggagccatcttcc |
| 481 | Tgctcccactccatgaggtatttcgacaccgccgtgtcccggcccggccgcggagagccccgc |
| | ttcatctcagtgggctacgtggacgacacgcagttcgtgcggttcgacagcgacgccgcgagt |
| | ccgagaggggagccgcgggcgccgtgggtggagcaggaggggccggagtattgggaccgggag |
| | acacagaactacaagcgccaggcacaggctgaccgagtgagcctgcggaacctgcgcggcgcc |
| | tacaaccagagcgaggacgggtctcacaccctccagaggatgtatggctgcgacctggggccc |
| | gacgggcgcctcctccgcgggtatgaccagtccgcctacgacggcaaggattacatcgccctg |
| | aacgaggacctgcgctcctggaccgccgcggacaccgcggctcagatcacccagcgcaagttg |
| | gaggcggcccgtgcggcggagcagctgagagcctacctggagggcacgtgcgtggagtggctc |
| | cgcagatacctggagaacgggaaggagacactgcagcgcgcagaacccccaaagacacacgtg |
| | acccaccaccccctctctgaccatgaggccaccctgaggtgctgggccctgggcttctaccct |
| | gcggagatcacactgacctggcagcgggatggggaggaccagacccaggacaccgagcttgtg |
| | gagaccaggccagcaggagatggaaccttccagaagtgggcagctgtggtggtgccttctgga |
| | caagagcagagatacacgtgccatatgcagcacgaggggctgcaagagcccctcaccctgagc |
| | tgggagccatcttcc |
| 482 | tgctcccactccatgaggtatttcgacaccgccgtgtcccggcccggccgcggagagccccgc |
| | ttcatctcagtgggctacgtggacgacacgcagttcgtgcggttcgacagcgacgccgcgagt |
| | ccgagaggggagccgcgggcgccgtgggtggagcaggaggggccggagtattgggaccgggag |
| | acacagaagtacaagcgccaggcacaggctgaccgagtgagcctgcggaacctgcgcggcgcc |
| | tacaaccagagcgaggacgggtctcacaccctccagaggatgtctggctgcgacctggggccc |
| | gacgggcgcctcctccgcgggtatgaccagtccgcctacgacggcaaggattacatcgccctg |
| | aacgaggacctgcgctcctggaccgccgcggacaccgcggctcagatcacccagcgcaagttg |
| | gaggcggcccgtgcggcggagcagctgagagcctacctggagggcacgtgcgtggagtggctc |
| | cgcagatacctggagaacgggaaggagacactgcagcgcgcagaacccccaaagacacacgtg |
| | acccaccaccccctctctgaccatgaggccaccctgaggtgctgggccctgggcttctaccct |
| | gcggagatcacactgacctggcagcgggatggggaggaccagacccaggacaccgagcttgtg |
| | gagaccaggccagcaggagatggaaccttccagaagtgggcagctgtggtggtgccttctgga |
| | caagagcagagatacacgtgccatatgcagcacgaggggctgcaagagcccctcaccctgagc |
| | tgggagccatcttcc |
| 483 | tgctcccactccatgaggtatttctacaccgccgtgtcccggcccggccgcggagagccccgc |
| | ttcatcgcagtgggctacgtggacgacacgcagttcgtgcggttcgacagcgacgccgcgagt |
| | ccaagaggggagccgcgggcgccgtgggtggagcaggaggggccggagtattgggaccgggag |
| | acacagaagtacaagcgccaggcacagactgaccgagtgagcctgcggaacctgcgcggcgcc |
| | tacaaccagagcgaggccgggtctcacaccctccagtggatgtatggctgcgacctggggccc |
| | gacgggcgcctcctccgcgggtatgaccagtccgcctacgacggcaaggattacatcgccctg |
| | aacgaggacctgcgctcctggaccgccgcggacacggcggctcagatcacccagcgcaagtgg |
| | gaggcggcccgtgcggcggagcagcagagagcctacctggagggcacgtgcgtggagtggctc |
| | cgcagatacctggagaacgggaaggagacactgcagcgcgcggaacacccaaagacacacgtg |
| | acccaccatttggtctctgaccatgaggccaccctgaggtgctgggccctgggcttctaccct |
| | gcggagatcacactgacctggcagcgggatggcgaggaccaaactcaggacaccgagcttgtg |
| | gagaccaggccagcaggagatggaaccttccagaagtgggcagctgtggtggtgccttctgga |
| | gaagagcagagatacacgtgccatgtgcagcacgaggggctgccggagcccctcaccctgaga |
| | tgggagccatcttcc |
| 484 | ggctcccactccttgaagtatttccacacttccgtgtcccggcccggccgcggggagccccgc |
| | ttcatctctgtgggctacgtggacgacacccagttcgtgcgcttcgacaacgacgccgcgagt |
| | ccgaggatggtgccgcgggcgccgtggatggagcaggaggggtcagagtattgggaccgggag |
| | acacggagcgccagggacaccgcacagattttccgagtgaacctgcggacgctgcgcggcgcc |
| | tacaatcagagcgaggccgggtctcacaccctgcagtggatgcatggctgcgagctggggccc |
| | gacgggcgcttcctccgcgggtatgaacagttcgcctacgacggcaaggattatctcaccctg |
| | aatgaggacctgcgctcctggaccgcggtggacacggcggctcagatctccgagcaaaagtca |
| | aatgatgcctctgaggcggagcaccagagagcctacctggaagacacatgcgtggagtggctc |
| | cacaaatacctggagaaggggaaggagacactgcttcacctggagcccccaaagacacacgtg |
| | actcaccaccccatctctgaccatgaggccaccctgaggtgctgggccctgggcttctaccct |
| | gcggagatcacactgacctggcagcaggatggggagggccatacccaggacacggagctcgtg |
| | gagaccaggcctgcaggggatggaaccttccagaagtgggcagctgtggtggtgccttctgga |
| | gaggagcagagatacacgtgccatgtgcagcatgaggggctacccgagcccgtcaccctgaga |
| | tggaagccggcttcc |

[0093] In some embodiments, the plurality of the HLA-antigen polypeptide complexes of the randomized peptide antigen libraries comprise at least about 10⁵ different HLA-antigen polypeptide complexes. Components of the 10⁵ different HLA-antigen polypeptide complexes include, collectively, at least about 10⁵ different randomized antigen polypeptides. In some embodiments, the plurality of the HLA-antigen polypeptide complexes of the randomized peptide antigen libraries comprise at least about 10⁷ different HLA-antigen polypeptide complexes. Components of the 10⁷ different HLA-antigen polypeptide complexes include, collectively, at least about 10⁷ different randomized antigen polypeptides. In some embodiments, the plurality of the HLA-antigen polypeptide complexes of the randomized peptide antigen libraries comprise at least about 10⁹ different HLA-antigen polypeptide complexes. Components of the 10⁹ different HLA-antigen polypeptide complexes include, collectively, at least about 10⁹ different randomized antigen polypeptides. In some embodiments, the plurality of the HLA-antigen polypeptide complexes of the randomized peptide antigen libraries comprise at least about 10¹¹ different HLA-antigen polypeptide complexes. Components of the 10¹¹ different HLA-antigen polypeptide complexes include, collectively, at least about 10¹¹ different randomized antigen polypeptides.

[0094] In some embodiments, the plurality of the HLA-antigen polypeptide complexes of the randomized peptide antigen libraries further comprise a β2-microglobulin polypeptide, which interacts with and stabilizes the HLA-antigen polypeptide complexes on the surface of the cell. The amino acid sequence of human β2-microglobulin polypeptide is set forth in NCBI Seq. Ref. NP_004039. In some embodiments, the human β2-microglobulin polypeptide amino acid sequence of the present disclosure is a functional naturally occurring variant of the human β2-microglobulin polypeptide having an amino acid sequence at least about 90%, 95%, 97%, 98%, or 99% identical to the human β2-microglobulin polypeptide disclosed as NCBI Seq. Ref NP_004039.

[0095] The present disclosure also includes antigen screening libraries of a plurality HLA-antigen polypeptide where the β2-microglobulin is constitutively expressed by a cell. In some embodiments, the β2-microglobulin is encoded by a first nucleic acid, the randomized antigen polypeptide encoded by a second nucleic acid, and the HLA polypeptide is encoded by a third nucleic acid. In other embodiments, the β2-microglobulin is encoded by a first nucleic acid and the randomized antigen polypeptide and the HLA polypeptide is encoded by a second nucleic acid. When encoded by the first nucleic acid, the β2-microglobulin can be transduced, transfected, or transformed into a cell before or after the second nucleic acid or the third nucleic acid.

[0096] In some embodiments of the present disclosure, the β2-microglobulin is fused to at least one of the randomized antigen polypeptides of the antigen screening library using techniques known to those of ordinary skill in the art. In these embodiments, the HLA polypeptides may or may not be a component of the antigen screening library. In other embodiments of the present disclosure, at least one of the HLA polypeptides is fused to at least one of the randomized antigen polypeptides of the antigen screening library using techniques known to those of ordinary skill in the art. In these embodiments, the β2-microglobulin can be expressed by a cell that is transduced, transfected, or transformed to express other components of the antigen screening library, such as the randomized antigen polypeptides and the HLA polypeptides. Similar to other embodiments described herein, the β2-microglobulin is constitutively expressed by the cell. In certain of these embodiments, the cell is a yeast cell. In other embodiments, the β2-microglobulin is not expressed by the cell that is transduced, transfected, or transformed to express other components of the antigen screening library, such as the randomized antigen polypeptides and the HLA polypeptides. In certain of these embodiments, the cell is a mammalian cell.

[0097] In addition to the (a) randomized antigen polypeptide, (b) MHC I HLA molecule, and (c) β2-microglobulin features of the HLA-antigen polypeptide complex of the randomized peptide antigen libraries, the HLA-antigen polypeptide complexes of the present disclosure can further include (d) a signal sequence, (e) polypeptide linkers between any or all of (a), (b), or (c), (f) a membrane tethering domain, and, optionally, (g) an epitope tag, such as a FLAG tag, a c-Myc tag, a His-tag, a hemagglutinin (HA) tag, a VSVg tag, a V5 tag, an AU1 tag, an AU5 tag, a Glu-Glu tag, an OLLAS tag, a T7 tag, an S-TagHSV tag, a KT3 tag, a TK15 tag, an Fc tag, an Xpress tag, a Ty tag, a Strep tag, an NE tag, an E tag, a C-tag, and/or an AviTag. In some embodiments, the HLA-antigen complexes do not comprise an epitope tag. However, in some embodiments, at least one or more of each of the plurality of HLA-antigen complexes of the randomized peptide antigen libraries comprise the epitope tag which allows for confirmation of expression of at least one of the HLA-antigen complexes using an antibody specific for the epitope. In some embodiments, each of the plurality of HLA-antigen complexes of the randomized peptide antigen libraries comprise the epitope tag.

[0098] In some embodiments, the membrane tethering domain comprises a polypeptide linker separating the membrane tethering domain from one or more other features ((a)-(e) and (g)) of the HLA-antigen polypeptide complex. In some embodiments, the features ((a)-(g)) of the HLA-antigen polypeptide complex are expressed as a single polypeptide. In some embodiments, the (b) HLA molecule (e.g., HLA polypeptide), the (a) randomized antigen polypeptide, and the (c) β2-microglobulin polypeptide comprise a single polypeptide. In some embodiments, the (b) HLA polypeptide and the (a) randomized antigen polypeptide are expressed as a single polypeptide, while, the (c) β2-microglobulin is expressed separately. For example, the (c) β2-microglobulin can be supplied from a separate polypeptide encoded by the same nucleic acid that expresses the (a) randomized antigen polypeptide and the (b) HLA polypeptide, a separate nucleic acid, or endogenously produced by the cell. In some embodiments, the randomized antigen polypeptide is N-terminal to the HLA polypeptide, and the HLA polypeptide is N-terminal to the β2-microglobulin polypeptide. In some embodiments, the randomized antigen polypeptide is C-terminal to the HLA polypeptide, and the HLA polypeptide is N-terminal to the β2-microglobulin polypeptide. In some embodiments, the randomized antigen polypeptide is N-terminal to the HLA polypeptide, and the HLA polypeptide is C-terminal to the β2-microglobulin polypeptide. In some embodiments, the randomized antigen polypeptide is C-terminal to the HLA polypeptide, and the HLA polypeptide is C-terminal to the β2-microglobulin polypeptide.

[0099] The (a) a randomized antigen polypeptide, (b) a major histocompatibility class I (MHC I) HLA molecule, and (c) a β2-microglobulin, can be separated by at least one flexible polypeptide linker, such as a first flexible polypeptide linker, a second flexible polypeptide linker, a third flexible polypeptide linker, a fourth flexible polypeptide linker, a fifth flexible polypeptide linker, or more flexible polypeptide linkers. In some embodiments, the at least one flexible polypeptide linker can range between about 3 and about 100 amino acid residues in length, between about 5 and about 80 amino acid residues in length, between about 10 and about 70 amino acid residues in length, between about 3 and about 100 amino acid residues in length, between about 20 and about 60 amino acid residues in length. In some embodiments, the linker can be about 5, 10, 15, 20, 25, 30, 35, 40, 45, 50, 55, 60, 65, 70, 75, 80, 85, 90, 95, or 100 amino acid residues in length. In some embodiments, the linker can be a glycine linker, or a Gly-Ser linker of the formula (GGGGS)_{X}, wherein X is 1, 2, 3, 4, 5, 6, 7, 8, 9 or 10. In some embodiments, the linker can suitably comprise a protease cleavage site such as a thrombin cleavage site.

[0100] In some embodiments, the HLA-antigen polypeptide complexes of the randomized peptide antigen libraries comprise a signal polypeptide which directs the HLA-antigen polypeptide complex to the cell surface via the secretory pathway. This signal peptide is cleaved in the endoplasmic reticulum and is not expressed by the HLA-antigen polypeptide complex when located on the cell-surface. The signal sequence can be any suitable sequence such as an endogenous HLA leader sequence, or a heterologous leader sequence imported from a different secretory or transmembrane molecule, such as an immunoglobulin leader sequence.

[0101] The HLA-antigen polypeptide complexes further comprise a membrane tethering domain, such as an anchor domain from a glycosylphosphatidylinositol (GPI) protein and/or a domain from yeast proteins having internal repeats (PIR protein). This membrane tethering domain can comprise a transmembrane domain or a domain that interacts with a cell surface protein. In some embodiments, the membrane tethering domain comprise at least one anchor domain of a GPI protein selected from the group consisting of yeast Aga2, Cwp1p, Cwp2p, Aga1p, Tip1p, Flo1p, Sed1p, YCR89w, and Tir1p and/or a PIR protein selected from the group consisting of yeast Pir1p, Pir2p, Pir3p, Pir4p, and Pir5p. A non-limiting example of membrane domain tethering is provided in FIG. 1B.

[0102] In other embodiments, components of the antigen screening libraries of a plurality HLA-antigen polypeptide complexes are expressed as more than one polypeptide and include a cleavage sequence which separates components of the antigen screening libraries of a plurality HLA-antigen polypeptide complexes from one another. For example, the randomized peptide antigen is separated from the HLA polypeptide and/or from the Beta-2 (β2) microglobulin polypeptide by the cleavage sequence. As another example, the HLA peptide is separated from the Beta-2 (β2) microglobulin polypeptide by the nucleotide encoded cleavage sequence. In some embodiments, the components of the antigen screening libraries are separated by more than one cleavage sequence. Suitable cleavage sequences are known to those of ordinary skill in the art and include, but are not limited to, self-cleaving peptides (P2A, T2A, F2A, and E2A), proteolytic cleavage sites (a 3C site, a thrombin site, a TEV site, a Factor Xa site, and an EKT site) and an internal ribosome entry sequence (IRES).

[0103] In some embodiments, the antigen screening library and/or the HLA-antigen polypeptide complexes can be expressed by one or more cells that can easily be transfected, transduced, electroporated, or transformed with the nucleic acids described herein. In some embodiments, the antigen screening library and/or the HLA-antigen polypeptide complexes are expressed on a plurality of cells. In some embodiments, each cell of the plurality of cells expresses a specific HLA-antigen complex of the HLA-antigen polypeptide complexes and/or another component of the antigen screening library. In some embodiments, a nucleic acid or a plurality of nucleic acids encode the antigen screening library and/or the HLA-antigen polypeptide complexes. In some embodiments, the antigen screening library and/or the HLA-antigen polypeptide complexes comprise prokaryotic cells. In some embodiments, the cell expressing the HLA-antigen polypeptide complexes comprise eukaryotic cells. In some embodiments, the eukaryotic cells comprise yeast cells. In some embodiments, the yeast cells are a cell of Saccharomyces cerevisiae. In some embodiments, the Saccharomyces cerevisiae is of the strain EBY100. Transforming Saccharomyces cerevisiae with nucleic acids can be achieved by standard methods as long as the efficiency is sufficient to produce at least 10⁷, 10⁸, 10⁹, or 10¹⁰ transformants.

[0104] In addition to the plurality of HLA-antigen polypeptide complexes of the antigen screening libraries described above, the present technology also includes at least two or more antigen screening libraries having HLA-antigen polypeptide complexes that differ from those described above. In some embodiments, the HLA-antigen polypeptide complexes have fewer components and/or at least one different component than the plurality of HLA-antigen polypeptide complexes described above. For example, in some embodiments, HLA-antigen polypeptide complexes can also comprise (a) an HLA polypeptide having a peptide binding cleft; and (b) a randomized antigen polypeptide comprising an amino acid sequence set forth in any one of SEQ ID NOs: 1 to 209 that specifically binds to the peptide binding cleft of the HLA polypeptide. In these embodiments, the HLA polypeptide, and the randomized antigen polypeptide comprise a single polypeptide. Also in these embodiments, the single polypeptide further comprises a first flexible polypeptide linker separating the HLA polypeptide from the randomized antigen polypeptide. When expressed on a single polypeptide separated by the first flexible polypeptide linker, the randomized antigen polypeptide is N-terminal to the HLA polypeptide on the single polypeptide or the randomized antigen polypeptide is C-terminal to the HLA polypeptide on the single polypeptide.

[0105] As another example, in some embodiments, antigen screening libraries of the present technology comprise (a) an HLA polypeptide constitutively expressed by one or more yeast cells, the HLA polypeptide comprising a peptide binding cleft, and (b) a plurality of Beta-2 (β2) microglobulin polypeptide-antigen polypeptide complexes. In these embodiments, the plurality of Beta-2 (β2) microglobulin polypeptide complexes include a randomized antigen polypeptide comprising an amino acid sequence set forth in any one of SEQ ID NOs: 1 to 209, wherein the randomized antigen polypeptide specifically binds to the peptide binding cleft of the HLA polypeptide; and (c) a Beta-2 (β2) microglobulin polypeptide. In these embodiments, the randomized antigen polypeptide and the β2-microglobulin polypeptide comprise a single polypeptide. Also, in these embodiments, the single polypeptide further comprises a first flexible polypeptide linker separating the Beta-2 (β2) microglobulin polypeptide from the randomized antigen polypeptide. When expressed on a single polypeptide separated by the first flexible polypeptide linker, the randomized antigen polypeptide is N-terminal to the Beta-2 (β2) microglobulin polypeptide on the single polypeptide or the randomized antigen polypeptide is C-terminal to the Beta-2 (β2) microglobulin polypeptide on the single polypeptide.

### Nucleic Acids Encoding HLA-Antigen Polypeptide Complexes

[0106] Also disclosed herein are nucleic acids that encode HLA-antigen polypeptide complexes of the antigen screening libraries. Nucleic acids that encode the HLA-antigen polypeptide complexes of the current disclosure minimally encode: (a) a randomized antigen polypeptide, (b) an MHC I HLA molecule, and a (c) β2-microglobulin. In addition to the (a) randomized antigen polypeptide, (b) MHC I HLA molecule, and (c) β2-microglobulin features of the HLA-antigen polypeptide complex of the randomized peptide antigen libraries encoded by one or more nucleic acids, the HLA-antigen polypeptide complexes of the present disclosure further include nucleic acids which encode (d) a signal sequence, (e) polypeptide linkers between any or all of (a), (b), or (c), (f) a membrane tethering domain, and, optionally, (g) an epitope tag, such as a FLAG tag, a c-MYC tag, a HIS-tag, a hemagglutinin tag, a VSVg tag, a V5 tag, an AU1 tag, an AU5 tag, a Glu-Glu tag, an OLLAS tag, a T7 tag, an S-Tag, an HSV tag, a KT3 tag, a TK15 tag, an Fc tag, an Xpress tag, a Ty tag, a Strep tag, an NE tag, an E tag, a C-tag, and/or an AviTag (FIG. 1A and FIG. 1B).

[0107] In some embodiments, the nucleic acid encoding the (f) membrane tethering domain may further encode (e) one or more polypeptide linkers separating the membrane tethering domain from other features of the HLA-antigen polypeptide complex. In some embodiments, the nucleic acid encodes one or more flexible polypeptide linkers which separate the (a) HLA polypeptide from the (b) randomized antigen polypeptide and the (c) β2-microglobulin polypeptide when all three features are encoded on the single nucleic acid.

[0108] In some embodiments, the nucleic acid encoding the single polypeptide further comprises nucleotides which encode a first flexible polypeptide linker and a second flexible polypeptide linker, wherein the nucleotide sequence encoding the first flexible polypeptide linker separates the nucleotide sequence encoding the HLA polypeptide from the nucleotide sequence encoding the randomized antigen polypeptide, and the nucleotide sequence encoding the second flexible polypeptide linker separates the nucleotide sequence encoding the randomized antigen polypeptide from the nucleotide sequence encoding the β2-microglobulin polypeptide. In some embodiments, once expressed, the randomized antigen polypeptide is N-terminal to the HLA polypeptide on the single polypeptide, and the HLA polypeptide is N-terminal to the β2-microglobulin polypeptide on the single polypeptide.

[0109] In some embodiments, the nucleotide sequence encoding the first flexible polypeptide linker separates the nucleotide sequence encoding the HLA polypeptide from the nucleotide sequence encoding the randomized antigen polypeptide, and the nucleotide sequence encoding the second flexible polypeptide linker separates the nucleotide sequence encoding the HLA polypeptide from the nucleotide sequence encoding the β2-microglobulin polypeptide. In some embodiments, once expressed, the randomized antigen polypeptide is C-terminal to the HLA polypeptide on the single polypeptide, and the HLA polypeptide is N-terminal to the β2-microglobulin polypeptide on the single polypeptide.

[0110] In some embodiments, the nucleotide sequence encoding the first flexible polypeptide linker separates the nucleotide sequence encoding the HLA polypeptide from the nucleotide sequence encoding the randomized antigen polypeptide, and the nucleotide sequence encoding the second flexible polypeptide linker separates the nucleotide sequence encoding the HLA polypeptide from the nucleotide sequence encoding the β2-microglobulin polypeptide. In some embodiments, once expressed, the randomized antigen polypeptide is N-terminal to the HLA polypeptide on the single polypeptide, and the HLA polypeptide is C-terminal to the β2-microglobulin polypeptide on the single polypeptide.

[0111] In some embodiments, the nucleotide sequence encoding the first flexible polypeptide linker separates the nucleotide sequence encoding the randomized antigen polypeptide from the nucleotide sequence encoding the β2-microglobulin polypeptide, and the nucleotide sequence encoding the second flexible polypeptide linker separates the nucleotide sequence encoding the β2-microglobulin polypeptide from the nucleotide sequence encoding the HLA polypeptide. In some embodiments, once expressed the randomized antigen polypeptide is C-terminal to the HLA polypeptide on the single polypeptide, and the HLA polypeptide is C-terminal to the β2-microglobulin polypeptide on the single polypeptide.

[0112] In some embodiments, the nucleotide sequence encoding the first flexible polypeptide linker separates the nucleotide sequence encoding the HLA polypeptide from the nucleotide sequence encoding the β2-microglobulin polypeptide, and the nucleotide sequence encoding the second flexible polypeptide linker separates the nucleotide sequence encoding the randomized antigen polypeptide from the nucleotide sequence encoding the HLA polypeptide. In some embodiments, once expressed, the β2-microglobulin polypeptide is C-terminal to the HLA polypeptide on the single polypeptide, and the HLA polypeptide is N-terminal to the randomized antigen polypeptide on the single polypeptide.

[0113] In some embodiments, the nucleotide sequence encoding the first flexible polypeptide linker separates the nucleotide sequence encoding the HLA polypeptide from the nucleotide sequence encoding the randomized antigen polypeptide, and the nucleotide sequence encoding the second flexible polypeptide linker separates the nucleotide sequence encoding the randomized antigen polypeptide from the nucleotide sequence encoding the β2-microglobulin polypeptide. In some embodiments, once expressed, the randomized antigen polypeptide is C-terminal to the β2-microglobulin on the single polypeptide, and the HLA polypeptide is C-terminal to the randomized antigen polypeptide on the single polypeptide. In some embodiments, the nucleotide sequence encoding the first flexible polypeptide linker separates the nucleotide sequence encoding the β2-microglobulin polypeptide from the nucleotide sequence encoding the randomized antigen polypeptide, and the nucleotide sequence encoding the second flexible polypeptide linker separates the nucleotide sequence encoding the randomized antigen polypeptide from the nucleotide sequence encoding the HLA polypeptide.

[0114] In other embodiments, components of the antigen screening libraries of a plurality HLA-antigen polypeptide complexes are expressed as more than one polypeptide despite being encoded by a single nucleic acid. In these embodiments, a nucleotide encoded cleavage sequence separates components of the antigen screening libraries of a plurality HLA-antigen polypeptide complexes from one another. For example, once expressed, the randomized peptide antigen is separated from the HLA polypeptide and/or from the Beta-2 (β2) microglobulin polypeptide by the cleavage sequence. As another example, once expressed, the HLA peptide is separated from the Beta-2 (β2) microglobulin polypeptide by the nucleotide encoded cleavage sequence. In these embodiments, a portion of the HLA polypeptide is expressed separately from other components of the antigen screening libraries of a plurality HLA-antigen polypeptide complexes and, when expressed separately, pairs naturally with the other components of the HLA-antigen polypeptide complexes inside the cell.

[0115] In some embodiments, the randomized antigen polypeptide of the HLA-antigen complex is encoded by a nucleic acid set forth in any one of SEQ ID NOs: 210 to 411. In some embodiments, the HLA polypeptide of the HLA-antigen complex is encoded by a nucleic acid at least 70%, 75%, 80%, 85%, 87.5%, 90%, 95%, 97%, 98%, 99%, or 100% homologous to any one of SEQ ID NOs: 210 to 411. In some embodiments, the randomized antigen polypeptide of the HLA-antigen complex is encoded by a nucleic acid set forth in any one of SEQ ID NOs: 412 to 426. In some embodiments, the HLA polypeptide of the HLA-antigen complex is encoded by a nucleic acid at least 70%, 75%, 80%, 85%, 87.5%, 90%, 95%, 97%, 98%, 99%, or 100% homologous to any one of SEQ ID NOs: 280 to 308. In some embodiments, one or more of the nucleic acids such as one or more of the nucleic acids of SEQ ID NOs: 210 to 411 and 412 to 426 are expressed by a plurality of cells. In some embodiments, each cell of the plurality of cells comprises a nucleic acid encoding a HLA-antigen complex. In some embodiments, the plurality of cells are a plurality of yeast cells. In some embodiments, the plurality of yeast cells are a plurality of cells of the of the EBY100 strain of Saccharomyces cerevisiae.

[0116] Nucleic acids encoding one or more components of the HLA-antigen polypeptide complexes can be delivered to the plurality of cells with a nucleic acid or a vector, such as an exogenous nucleic acid or exogenous vector. Suitable exogenous nucleic acids and exogenous vectors include plasmids, bacterial artificial chromosomes (BACs), yeast artificial chromosomes (YACs), transposons, and viral vectors. These exogenous nucleic acids and exogenous vectors can further comprise components that allow for replication of the nucleic acids encoding one or more components of the HLA-antigen polypeptide complexes, permit antibiotic selection to allow for section of cells or other organisms expressing the nucleic acids encoding one or more components of the HLA-antigen polypeptide complexes, genes that complement yeast autotrophies to select for yeast transformants expressing the nucleic acids encoding one or more components of the HLA-antigen polypeptide complexes, promoters or enhancers for prokaryotic or eukaryotic expression of the HLA-antigen polypeptide complexes, polyadenylation sites, or marker genes that allow for visualization of transformed cells. In some embodiments, the nucleic acids that comprise a nucleic acid encoding the HLA-antigen polypeptide complexes of the current disclosure comprise an inducible promoter.

[0117] Methods of using the HLA-antigen polypeptide complexes and nucleic acids encoding such complexes minimally comprise contacting one or more cells, such as a plurality of cells, expressing the HLA antigen polypeptide complexes with a TCR and selecting for one or more cells that interact with the TCR. Selection can be performed, for example, by using the TCR in a “panning step” to capture the one or more cells expressing HLA-antigen polypeptide complexes that interact with the TCR, and washing away any non-interacting cells, such as one or more cells that do not express the HLA-antigen polypeptide complexes that do not interact with the TCR. Nucleic acids from interacting cells can be harvested and sequenced to elucidate the amino acid sequences of the randomized antigen polypeptide that interacted with the TCR. These nucleic acids can be re-transfected, transformed, or transduced into one or more different cells for another round of selection. This method can be iterated for any number of rounds of selection, such as 1, 2, 3, 4, 5, or more times (e.g., in cycles) to enrich for HLA-antigen polypeptide complexes that strongly interact with the TCR.

[0118] Sequencing platforms that can be used in the present disclosure include, but are not limited to: pyrosequencing, sequencing-by-synthesis, single-molecule sequencing, second-generation sequencing, nanopore sequencing, sequencing by ligation, or sequencing by hybridization. Preferred sequencing platforms are those commercially available from Illumina (RNA-Seq) and Helicos (Digital Gene Expression or “DGE”). “Next generation” sequencing methods include, but are not limited to those commercialized by: 1) 454/Roche Lifesciences including but not limited to the methods and apparatus described in Margulies 2005 and in U.S. Pat. Nos. 7,244,559; 7,335,762; 7,211,390; 7,244,567; 7,264,929; and 7,323,305; 2) Helicos Biosciences Corporation (Cambridge, Mass.) as described in U.S. Pat. Nos. 7,501,245; 7,491,498; and 7,276,720; and in U.S. Patent Publ. Nos. 2006/0024711; 2009/0061439; 2008/0087826; 2006/0286566; 2006/0024711; 2006/0024678; 2008/0213770; and 2008/0103058; 3) Applied Biosystems (e.g. SOLiD sequencing); 4) Dover Systems (e.g., Polonator G.007 sequencing); 5) Illumina as described U.S. Pat. Nos. 5,750,341; 6,306,597; and 5,969,119; and 6) Pacific Biosciences as described in U.S. Pat. Nos. 7,462,452; 7,476,504; 7,405,281; 7,170,050; 7,462,468; 7,476,503; 7,315,019; 7,302,146; and 7,313,308; and in US Patent Publ. Nos. 2009/0029385; 2009/0068655; 2009/0024331; and 2008/0206764.

### Methods

[0119] Described herein are methods of using the HLA-antigen polypeptide complexes of the present disclosure to select or enrich for antigens that bind to a TCR, such as a specific TCR. In some embodiments, the method includes selecting an antigen comprising contacting one or more cells, such as a plurality of cells, expressing at the HLA antigen polypeptide complexes with a TCR using one or more transgenic HLA-antigen polypeptide cell libraries, such as a transgenic HLA-antigen polypeptide yeast cell libraries. The methods described herein include methods for constructing one or more transgenic HLA-antigen polypeptide yeast cell libraries.

[0120] After construction of the one or more transgenic HLA-antigen polypeptide yeast cell libraries, the methods further include validating one or more transgenic HLA-antigen polypeptide yeast cell libraries using limiting dilution methods which include limited dilution of one or more cultures of proliferating yeast cells that each express at least one of the HLA-antigen polypeptides with nutrient-deficient yeast media. In some embodiments, the methods further include counting yeast from diluted yeast cultures and estimating HLA-antigen polypeptide yeast cell libraries with diversities of at least about 10⁶, 10⁷, 10⁸, or 10⁹ unique HLA-antigen polypeptide sequences (e.g., clones). In some embodiments, expression of an epitope tag by a yeast cell is measured to determine if any of the 10⁶, 10⁷, 10⁸, or 10⁹ clones are displayed on a yeast cell surface. For example, expression of the epitope tag can be determined as a surrogate value for total HLA-antigen polypeptide expression in the plurality of yeast cells and percent expression can be calculated. In some embodiments, the percent expression is an estimate of a number of yeast cells expressing a certain HLA-antigen polypeptide relative to the HLA-antigen polypeptide sequence library.

[0121] Referring to FIG. 2, the plurality of cells 201, such as yeast, can be transformed, transfected, or electroplated with the plurality of nucleic acids encoding the HLA-antigen polypeptide complexes of the present disclosure 202. The plurality of cells expressing the plurality of nucleic acids encoding the HLA-antigen peptide complexes is referred to as a transgenic HLA-antigen polypeptide cell library 203. The transgenic HLA-antigen polypeptide cell library 203 is expanded through cell proliferation and expression of HLA-antigen polypeptide complexes 204 by the plurality of cells is induced by methods known in the art, for example, by galactose, lactose, or isopropyl β-D-1-thiogalactopyranoside (IPTG). Cells expressing an HLA-antigen polypeptide complex that interact with a TCR are positively selected using that TCR 205. In some embodiments, the TCR is immobilized on a substrate. In some embodiments, the TCR is expressed by a cell or a plurality of cells. This selection process illustrated in FIG. 2 can be repeated for any number of rounds of selection, such as 1, 2, 3, 4, 5, or more times to arrive at a single or small number of HLA-antigen polypeptide complexes that interact with the TCR. In some embodiments, the HLA-antigen polypeptide complexes include a polypeptide antigen. In some embodiments, the polypeptide antigen is a non-naturally occurring polypeptide antigen, such as a polypeptide antigen that does not naturally occur in a human. Deep sequencing or next-generation sequencing reactions can be performed on nucleic acids extracted from the selected cells 205 after each round of selection, or after the last round of selection.

[0122] In some embodiments, greater than at least 1×10⁴, at least 1×10⁵, at least 1×10⁶, at least 1×10⁷, at least 1×10⁸, at least 1×10⁹, at least 1×10¹⁰, at least 1×10¹¹, at least 1×10¹², at least 1×10¹³, at least 1×10¹⁴, or at least 1×10¹⁵ different HLA-antigen polypeptide complexes are screened with methods of the present disclosure, such as those illustrated in FIG. 2. In some embodiments, the methods of the present disclosure result in identification of less than 10⁴, 10³, 10², 10, 9, 8, 7, 6, 5, 4, 3, or 2 different HLA-antigen polypeptide complexes. In some embodiments, greater than 90%, 95%, 97%, 98%, or 99% of the HLA-antigen polypeptide complexes remaining after 1, 2, 3, 4, or 5 rounds of selection comprise less than 10, 9, 8, 7, 6, 5, 4, 3, or 2 different HLA-antigen polypeptide complexes. In some embodiments, greater than 90%, 95%, 97%, 98%, or 99% of the HLA-antigen polypeptide complexes remaining after 1, 2, 3, 4, or 5 rounds of selection comprise less than 10, 9, 8, 7, 6, 5, 4, 3, or 2 different antigenic polypeptide sequences within the HLA-antigen polypeptide complexes. In some embodiments, greater than 90%, 95%, 97%, 98%, or 99% of the HLA-antigen polypeptide complexes remaining after 1, 2, 3, 4, or 5 rounds of selection comprise a single HLA-antigen polypeptide complex. In some embodiments, greater than 90%, 95%, 97%, 98%, or 99% of the HLA-antigen polypeptide complexes remaining after 1, 2, 3, 4, or 5 rounds of selection comprise a single antigenic polypeptide sequence within a single HLA-antigen polypeptide complex.

[0123] Expression of naive yeast libraries, such as the HLA-antigen polypeptide sequence libraries described herein, minimally express at about 15% of total antigen polypeptide sequences in an antigen polypeptide sequence library for a single length 9mer peptide presented by HLA-A1 (Gee 2018b) and less than about 5% of a single length peptide (e.g., 8mer) expression in an antigen polypeptide sequence library having mixed length peptides (e.g., 8mer, 9mer, 10 mer, 11 mer, 12mer) presented by HLA-A2 (Gee 2018a). Despite less than about 5% single length expression of the antigen polypeptide sequence library having 8mer length peptides, TCRs isolated target 8mer antigens from the antigen polypeptide sequence library that stimulated the TCR in an in vitro co-culture assay (Gee 2018a). These antigen polypeptide sequence libraries have been screened and isolate peptides against TCRs of known specificity (Gee 2018a). While a minimum level of expression necessary for a functional library has not yet been determined, data shows that less than 15% expression can result in an antigen polypeptide sequence library useful with the methods described herein.

[0124] In some embodiments, methods of the present disclosure further include identifying a polypeptide antigen that interact with a TCR. For example, a method for determining TCR interacting polypeptide antigens can comprise any of the following steps:
[0125] 1. Generation and HLA-antigen polypeptide complex construct design: In some embodiments, step (1) includes, but is not limited to, generating one or more DNA constructs and/or designs to display one or more HLA polypeptides with a naturally occurring protein sequence, a synthetic protein sequences, or a combination thereof.
[0126] 2. Test expression of the HLA-antigen polypeptide complex construct via yeast expression: In some embodiments, step (2) includes, but is not limited to, transforming one or more electro- or chemically competent yeast with a plasmid encoding a single peptide or library of peptides including the HLA of interest, such as the HLA polypeptide. The plasmid is designed for the single peptide construct or library of peptides constructs to display from the N-terminus of Aga2, a yeast protein. In some embodiments, expression confirmation can include antibody staining of an epitope tag (e.g., V5, VSVg, c-Myc, HA) or fluorescent TCR tetramer, dimer, or dextramer staining of yeast displaying a single peptide-HLA construct or library of peptide-HLA constructs.
[0127] 3. Optional validation step for HLA display: In some embodiments, step (3) includes, but is not limited to, antibody-based staining of the epitope tag or fluorescent TCR tetramer, dimer, or dextramer staining of yeast displaying a single peptide-HLA construct or library of peptide-HLA constructs of step (2). In some embodiments, validation can also include staining a peptide-HLA construct with a TCR of known specificity or for selecting a diverse peptide library presented by the HLA.
[0128] 4. Optional step to re-engineer the HLA for display: In some embodiments, step (4) includes, but is not limited to, random mutagenesis via an error-prone polymerase followed by electroporation into chemically and/or electro-competent yeast. Yeast cells expressing the library and/or libraries of the present technology are selected with cell separation by magnetic cell sorting (MACS) or fluorescence-activated cell sorting (FACS) based on a TCR of interest. In some embodiments, isolated yeast clones are sequenced or deep-sequenced to identify any functional HLA mutants that properly display antigenic peptides of interest. Step (4) is included in some embodiments if the construct or library is improperly displayed.
[0129] 5. Generation of the peptide-HLA library: In some embodiments, step (5) includes, but is not limited to, randomized encoded peptide ligands or explicitly encoded peptide ligands. For example, the randomized encoded peptide ligands or explicitly encoded peptide ligands are uniquely designed for each HLA allele based on a preference for which peptides each HLA allele can present. In some embodiments, step (5) also includes generating genetic material from one or more polymerase-chain reactions.
[0130] 6. Selection of the peptide-HLA library with a TCR of interest: In some embodiments, step (6) includes, but is not limited to, iterative MACS-based or FACS-based selection. For example, the TCR of interest, or other macromolecule having one or more antigen binding domains, acts as bait and can be multimerized on magnetic beads, streptavidin, dextran, or other substrates suitable for multimerization. In some embodiments, output from one or more selection rounds includes physically isolating one or more yeast cells with the TCR. Following isolation, the yeast are propagated and re-induced for protein expression. These iterative rounds enrich for binding yeast populations.
[0131] 7. Deep-sequencing and data analysis: This process can involve extracting the genetic information of the yeast library and selection, and sequencing the products to identify the nature of peptides from the selected library. These data can then be analyzed to identify potential targets of TCRs and/or fed into algorithms to make predictions about TCR specificity.

### T Cell Receptors (TCRs)

[0132] The transgenic HLA-antigen polypeptide cell libraries and antigens of the HLA-antigen polypeptide complexes described herein can be used in conjunction with a given TCR. For example, the TCR, or other macromolecule having one or more antigen binding domains, is a positive selector or bait and once bound to an antigen (e.g., HLA-antigen polypeptide complex), identifies its cognate antigen. The TCRs described herein can be native or exogenous (e.g., recombinant) and expressed by a cell, such as a primary T cell, an immortalized T cell, or a non-T cell. In some embodiments, the TCR is immobilized on a solid support such as a column, a polystyrene plate or well of a multi-well plate, or a bead. In some embodiments, the TCR is multimerized as a plurality of TCRs immobilized on a bead. For example, the TCR can be multimerized on but not limited to magnetic beads, streptavidin, or dextran.

[0133] In some embodiments, the TCR is a soluble protein comprising at least one or more binding domains of a TCR of interest, e.g. TCRα/β, TCRγ/δ. The soluble protein may be a single chain, or a heterodimer. In some embodiments, the soluble TCR is modified by the addition of a biotin acceptor peptide sequence at the C terminus of one polypeptide. After biotinylation at the acceptor peptide, the TCR can be multimerized or added to substrate by binding to biotin binding partner, e.g. avidin, streptavidin, traptavidin, neutravidin, etc. In some embodiments, the biotin binding partner can comprise a detectable label, e.g. a fluorophore, mass label, etc., or can be bound to a particle, e.g. a paramagnetic particle. Selection of ligands bound to the TCR can be performed by flow cytometry, magnetic selection, and the like as known in the art.

[0134] To the extent the foregoing materials and/or any other materials incorporated herein by reference conflict with the present disclosure, the present disclosure controls.

[0135] The following examples provide further representative embodiments of the presently disclosed technology.

### EXAMPLES

[0136] The following examples are provided to further illustrate embodiments of the present technology and are not to be interpreted as limiting the scope of the present technology. To the extent that certain embodiments or features thereof are mentioned, it is merely for purposes of illustration and, unless otherwise specified, is not intended to limit the present technology. One skilled in the art may develop equivalent means without the exercise of inventive capacity and without departing from the scope of the present technology. It will be understood that many variations can be made in the procedures herein described while remaining within the bounds of the present technology. Such variations are intended to be included within the scope of the presently disclosed technology. As such, embodiments of the presently disclosed technology are described in the following representative examples.

### Example 1: Design of an Antigen Polypeptide Library

[0137] This example describes design of the antigen libraries of the present disclosure for use with a polypeptide antigen HLA complex. An exemplary algorithm to design and select anchor residues for each HLA allele is as follows, using data of known HLA binding epitopes ligands from a website such as www.IEDB.org/:

[0138] Step 1: download list of polypeptides that bind to a given allele which may comprise several hundred peptides or several thousand peptides.

[0139] Step 2: construct a frequency matrix of residues per position of the peptide based upon the downloaded known peptides.

[0140] Step 3: select composition of “anchors” for library design by using a cutoff of the top 4 residues at each position.

### Example 2: Electroporation of pHLA Library

[0141] This example describes electroporating yeast cells with nucleic acids encoding an exemplary antigen library of the present disclosure having all HLA allotypes and using peptides of 8-11 amino acids in length (8mer-11 mer). In this example, yeast cells were electroporated with nucleic acids encoding the antigen library of HLA-antigen polypeptide complexes (pHLA library).

[0142] The electroporation methods for expression of pHLA on yeast are as follows:

[0143] Day 0:
[0144] 1. Autoclave three 2.5 L baffled flasks and one 250 ml baffled flask for expanding proliferating yeast cultures.
[0145] 2. Prepare Yeast Peptone Dextrose media (YPD), which includes bacto peptone, glucose, and yeast extract.
[0146] 3. Prepare two 5 ml EBY100 yeast cultures and shake at 30° C. overnight.
[0147] 4. Prepare pYAL_3T plasmid (10 μg) restriction enzyme digested with HindIII, NheI or NheI, and BamHI and insert containing libraries of SEQ ID NO: 210 to 411 (50 μg). pYAL_3T vector (SEQ ID NO: 485) is a derivative of pCT vector (SEQ ID NO: 486; Invitrogen), Table 8, and the maps are provided in FIGS. 3A and 3B. Features of pYAL_3T and pCT are included in Tables 9 and 10, respectively. pYAL_3T differs from pCT at least by the orientation of the display protein scaffold (Aga2) being C-terminal of the pHLA library, the addition of human B2M, and connecting linkers. pYAL_3T has been described (Gee 2018a).

TABLE 8
Nucleotide sequences of pYAL_3T and pCT vectors

| SEQ ID NO: | Nucleotide Sequence |
|---|---|
| 485 | acggattagaagccgccgagcgggtgacagccctccgaaggaagactctcctccgtgcgt |
| | cctcgtcttcaccggtcgcgttcctgaaacgcagatgtgcctcgcgccgcactgctccga |
| | acaataaagattctacaatactagcttttatggttatgaagaggaaaaattggcagtaac |
| | ctggccccacaaaccttcaaatgaacgaatcaaattaacaaccataggatgataatgcga |
| | ttagttttttagccttatttctggggtaattaatcagcgaagcgatgatttttgatctat |
| | taacagatatataaatgcaaaaactgcataaccactttaactaatactttcaacattttc |
| | ggtttgtattacttcttattcaaatgtaataaaagtatcaacaaaaaattgttaatatac |
| | ctctatactttaacgtcaaggagaaaaaaccccggatcggactactagcagctgtaatac |
| | gactcactatagggaatattaagctaattctacttcatacattttcaattaagatgcagt |
| | tacttcgctgtttttcaatattttctgttattgctagcgttttggctggtggaggaggtt |
| | ctggaggtggtggtagtggtggtggtggttccatacaaagaactccaaagatccaagttt |
| | acagtagacatcctgctgaaaacggtaaatctaatttcttgaactgttacgtctccggtt |
| | tccacccaagtgatatagaagttgacttgttgaaaaatggtgaaagaatcgaaaaggttg |
| | aacattcagatttgtctttttctaaggactggtccttctatttgttgtactacacagaat |
| | tcactccaactgaaaaggatgaatacgcttgcagagttaatcatgtaaccttgtctcaac |
| | ctaaaatcgttaagtgggatagagacatgggtggaggtggaagtggaggtggcggttcag |
| | gtggtggcggttccggtggaggtggatccgaacaaaagcttatctccgaagaagacttgg |
| | gtggtggtggatctggtggtggtggttctggtggtggtggttctcaggaactgacaacta |
| | tatgcgagcaaatcccctcaccaactttagaatcgacgccgtactctttgtcaacgacta |
| | ctattttggccaacgggaaggcaatgcaaggagtttttgaatattacaaatcagtaacgt |
| | ttgtcagtaattgcggttctcacccctcaacaactagcaaaggcagccccataaacacac |
| | agtatgttttttgagtttaaacccgctgatctgataacaacagtgtagatgtaacaaaat |
| | cgactttgttcccactgtacttttagctcgtacaaaatacaatatacttttcatttctcc |
| | gtaaacaacatgttttcccatgtaatatccttttctatttttcgttccgttaccaacttt |
| | acacatactttatatagctattcacttctatacactaaaaaactaagacaattttaattt |
| | tgctgcctgccatatttcaatttgttataaattcctataatttatcctattagtagctaa |
| | aaaaagatgaatgtgaatcgaatcctaagagaattgggcaagtgcacaaacaatacttaa |
| | ataaatactactcagtaataacctatttcttagcatttttgacgaaatttgctattttgt |
| | tagagtcttttacaccatttgtctccacacctccgcttacatcaacaccaataacgccat |
| | ttaatctaagcgcatcaccaacattttctggcgtcagtccaccagctaacataaaatgta |
| | agctctcggggctctcttgccttccaacccagtcagaaatcgagttccaatccaaaagtt |
| | cacctgtcccacctgcttctgaatcaaacaagggaataaacgaatgaggtttctgtgaag |
| | ctgcactgagtagtatgttgcagtcttttggaaatacgagtcttttaataactggcaaac |
| | cgaggaactcttggtattcttgccacgactcatctccgtgcagttggacgatatcaatgc |
| | cgtaatcattgaccagagccaaaacatcctccttaggttgattacgaaacacgccaacca |
| | agtatttcggagtgcctgaactatttttatatgcttttacaagacttgaaattttccttg |
| | caataaccgggtcaattgttctctttctattgggcacacatataatacccagcaagtcag |
| | catcggaatctagagcacattctgcggcctctgtgctctgcaagccgcaaactttcacca |
| | atggaccagaactacctgtgaaattaataacagacatactccaagctgcctttgtgtgct |
| | taatcacgtatactcacgtgctcaatagtcaccaatgccctccctcttggccctctcctt |
| | ttcttttttcgaccgaatttcttgaagacgaaagggcctcgtgatacgcctatttttata |
| | ggttaatgtcatgataataatggtttcttaggacggatcgcttgcctgtaacttacacgc |
| | gcctcgtatcttttaatgatggaataatttgggaatttactctgtgtttatttattttta |
| | tgttttgtatttggattttagaaagtaaataaagaaggtagaagagttacggaatgaaga |
| | aaaaaaaataaacaaaggtttaaaaaatttcaacaaaaagcgtactttacatatatattt |
| | attagacaagaaaagcagattaaatagatatacattcgattaacgataagtaaaatgtaa |
| | aatcacaggattttcgtgtgtggtcttctacacagacaagatgaaacaattcggcattaa |
| | tacctgagagcaggaagagcaagataaaaggtagtatttgttggcgatccccctagagtc |
| | ttttacatcttcggaaaacaaaaactattttttctttaatttctttttttactttctatt |
| | tttaatttatatatttatattaaaaaatttaaattataattatttttatagcacgtgatg |
| | aaaaggacccaggtggcacttttcggggaaatgtgcgcggaacccctatttgtttatttt |
| | tctaaatacattcaaatatgtatccgctcatgagacaataaccctgataaatgcttcaat |
| | aatattgaaaaaggaagagtatgagtattcaacatttccgtgtcgcccttattccdtttt |
| | tgcggcattttgccttcctgtttttgctcacccagaaacgctggtgaaagtaaaagatgc |
| | tgaagatcagttgggtgcacgagtgggttacatcgaactggatctcaacagcggtaagat |
| | ccttgagagttttcgccccgaagaacgttttccaatgatgagcacttttaaagttctgct |
| | atgtggcgcggtattatcccgtgttgacgccgggcaagagcaactcggtcgccgcataca |
| | ctattctcagaatgacttggttgagtactcaccagtcacagaaaagcatcttacggatgg |
| | catgacagtaagagaattatgcagtgctgccataaccatgagtgataacactgcggccaa |
| | cttacttctgacaacgatcggaggaccgaaggagctaaccgcttttttgcacaacatggg |
| | ggatcatgtaactcgccttgatcgttgggaaccggagctgaatgaagccataccaaacga |
| | cgagcgtgacaccacgatgcctgtagcaatggcaacaacgttgcgcaaactattaactgg |
| | cgaactacttactctagcttcccggcaacaattaatagactggatggaggcggataaagt |
| | tgcaggaccacttctgcgctcggcccttccggctggctggtttattgctgataaatctgg |
| | agccggtgagcgtgggtctcgcggtatcattgcagcactggggccagatggtaagccctc |
| | ccgtatcgtagttatctacacgacgggcagtcaggcaactatggatgaacgaaatagaca |
| | gatcgctgagataggtgcctcactgattaagcattggtaactgtcagaccaagtttactc |
| | atatatactttagattgatttaaaacttcatttttaatttaaaaggatctaggtgaagat |
| | cctttttgataatctcatgaccaaaatcccttaacgtgagttttcgttccactgagcgtc |
| | agaccccgtagaaaagatcaaaggatcttcttgagatcctttttttctgcgcgtaatctg |
| | ctgcttgcaaacaaaaaaaccaccgctaccagcggtggtttgtttgccggatcaagagct |
| | accaactctttttccgaaggtaactggcttcagcagagcgcagataccaaatactgtcct |
| | tctagtgtagccgtagttaggccaccacttcaagaactctgtagcaccgcctacatacct |
| | cgctctgctaatcctgttaccagtggctgctgccagtggcgataagtcgtgtcttaccgg |
| | gttggactcaagacgatagttaccggataaggcgcagcggtcgggctgaacggggggttc |
| | gtgcacacagcccagcttggagcgaacgacctacaccgaactgagatacctacagcgtga |
| | gcattgagaaagcgccacgcttcccgaagggagaaaggcggacaggtatccggtaagcgg |
| | cagggtcggaacaggagagcgcacgagggagcttccaggggggaacgcctggtatcttta |
| | tagtcctgtcgggtttcgccacctctgacttgagcgtcgatttttgtgatgctcgtcagg |
| | ggggccgagcctatggaaaaacgccagcaacgcggcctttttacggttcctggccttttg |
| | ctggccttttgctcacatgttctttcctgcgttatcccctgattctgtggataaccgtat |
| | taccgcctttgagtgagctgataccgctcgccgcagccgaacgaccgagcgcagcgagtc |
| | agtgagcgaggaagcggaagagcgcccaatacgcaaaccgcctctccccgcgcgttggcc |
| | gattcattaatgcagctggcacgacaggtttcccgactggaaagcgggcagtgagcgcaa |
| | cgcaattaatgtgagttacctcactcattaggcaccccaggctttacactttatgcttcc |
| | ggctcctatgttgtgtggaattgtgagcggataacaatttcacacaggaaacagctatga |
| | ccatgattacgccaagctcggaattaaccctcactaaagggaacaaaagctggctagt |
| 486 | acggattagaagccgccgagcgggtgacagccctccgaaggaagactctcctccgtgcgt |
| | cctcgtcttcaccggtcgcgttcctgaaacgcagatgtgcctcgcgccgcactgctccga |
| | acaataaagattctacaatactagcttttatggttatgaagaggaaaaattggcagtaac |
| | ctggccccacaaaccttcaaatgaacgaatcaaattaacaaccataggatgataatgcga |
| | ttagttttttagccttatttctggggtaattaatcagcgaagcgatgatttttgatctat |
| | taacagatatataaatgcaaaaactgcataaccactttaactaatactttcaacattttc |
| | ggtttgtattacttcttattcaaatgtaataaaagtatcaacaaaaaattgttaatatac |
| | ctctatactttaacgtcaaggagaaaaaaccccggatcggactactagcagctgtaatac |
| | gactcactatagggaatattaagctaattctacttcatacattttcaattaagatgcagt |
| | tacttcgctgtttttcaatattttctgttattgcttcagttttagcacaggaactgacaa |
| | ctatatgcgagcaaatcccctcaccaactttagaatcgacgccgtactctttgtcaacga |
| | ctactattttggccaacgggaaggcaatgcaaggagtttttgaatattacaaatcagtaa |
| | cgtttgtcagtaattgcggttctcacccctcaacaactagcaaaggcagccccataaaca |
| | cacagtatgtttttaagcttctgcaggctagtggtggtggtggttctggtggtggtggtt |
| | ctggtggtggtggttctgctagcatgactggtggacagcaaatgggtcgggatctgtacg |
| | acgatgacgataaggtaccaggatccagtgtggtggaattctgcagatatccagcacagt |
| | ggcggccgctcgagtctagagggcccttcgaaggtaagcctatccctaaccctctcctcg |
| | gtctcgattctacgcgtaccggtcatcatcaccatcaccattgagtttaaacccgctgat |
| | ctgataacaacagtgtagatgtaacaaaatcgactttgttcccactgtacttttagctcg |
| | tacaaaatacaatatacttttcatttctccgtaaacaacatgttttcccatgtaatatcc |
| | ttttctatttttcgttccgttaccaactttacacatactttatatagctattcacttcta |
| | tacactaaaaaactaagacaattttaattttgctgcctgccatatttcaatttgttataa |
| | attcctataatttatcctattagtagctaaaaaaagatgaatgtgaatcgaatcctaaga |
| | gaattgggcaagtgcacaaacaatacttaaataaatactactcagtaataacctatttct |
| | tagcatttttgacgaaatttgctattttgttagagtcttttacaccatttgtctccacac |
| | ctccgcttacatcaacaccaataacgccatttaatctaagcgcatcaccaacattttctg |
| | gcgtcagtccaccagctaacataaaatgtaagctctcggggctctcttgccttccaaccc |
| | agtcagaaatcgagttccaatccaaaagttcacctgtcccacctgcttctgaatcaaaca |
| | agggaataaacgaatgaggtttctgtgaagctgcactgagtagtatgttgcagtcttttg |
| | gaaatacgagtcttttaataactggcaaaccgaggaactcttggtattcttgccacgact |
| | catctccgtgcagttggacgatatcaatgccgtaatcattgaccagagccaaaacatcct |
| | ccttaggttgattacgaaacacgccaaccaagtatttcggagtgcctgaactatttttat |
| | atgcttttacaagacttgaaattttccttgcaataaccgggtcaattgttctctttctat |
| | tgggcacacatataatacccagcaagtcagcatcggaatctagagcacattctgcggcct |
| | ctgtgctctgcaagccgcaaactttcaccaatggaccagaactacctgtgaaattaataa |
| | cagacatactccaagctgcctttgtgtgcttaatcacgtatactcacgtgctcaatagtc |
| | accaatgccctccctcttggccctctccttttcttttttcgaccgaatttcttgaagacg |
| | aaagggcctcgtgatacgcctatttttataggttaatgtcatgataataatggtttctta |
| | ggacggatcgcttgcctgtaacttacacgcgcctcgtatcttttaatgatggaataattt |
| | gggaatttactctgtgtttatttatttttatgttttgtatttggattttagaaagtaaat |
| | aaagaaggtagaagagttacggaatgaagaaaaaaaaataaacaaaggtttaaaaaattt |
| | caacaaaaagcgtactttacatatatatttattagacaagaaaagcagattaaatagata |
| | tacattcgattaacgataagtaaaatgtaaaatcacaggattttcgtgtgtggtcttcta |
| | cacagacaagatgaaacaattcggcattaatacctgagagcaggaagagcaagataaaag |
| | gtagtatttgttggcgatccccctagagtcttttacatcttcggaaaacaaaaactattt |
| | tttctttaatttctttttttactttctatttttaatttatatatttatattaaaaaattt |
| | aaattataattatttttatagcacgtgatgaaaaggacccaggtggcacttttcggggaa |
| | atgtgcgcggaacccctatttgtttatttttctaaatacattcaaatatgtatccgctca |
| | tgagacaataaccctgataaatgcttcaataatattgaaaaaggaagagtatgagtattc |
| | aacatttccgtgtcgcccttattcccttttttgcggcattttgccttcctgtttttgctc |
| | acccagaaacgctggtgaaagtaaaagatgctgaagatcagttgggtgcacgagtgggtt |
| | acatcgaactggatctcaacagcggtaagatccttgagagttttcgccccgaagaacgtt |
| | ttccaatgatgagcacttttaaagttctgctatgtggcgcggtattatcccgtgttgacg |
| | ccgggcaagagcaactcggtcgccgcatacactattctcagaatgacttggttgagtact |
| | caccagtcacagaaaagcatcttacggatggcatgacagtaagagaattatgcagtgctg |
| | ccataaccatgagtgataacactgcggccaacttacttctgacaacgatcggaggaccga |
| | aggagctaaccgcttttttgcacaacatgggggatcatgtaactcgccttgatcgttggg |
| | aaccggagctgaatgaagccataccaaacgacgagcgtgacaccacgatgcctgtagcaa |
| | tggcaacaacgttgcgcaaactattaactggcgaactacttactctagcttcccggcaac |
| | aattaatagactggatggaggcggataaagttgcaggaccacttctgcgctcggcccttc |
| | cggctggctggtttattgctgataaatctggagccggtgagcgtgggtctcgcggtatca |
| | ttgcagcactggggccagatggtaagccctcccgtatcgtagttatctacacgacgggca |
| | gtcaggcaactatggatgaacgaaatagacagatcgctgagataggtgcctcactgatta |
| | agcattggtaactgtcagaccaagtttactcatatatactttagattgatttaaaacttc |
| | atttttaatttaaaaggatctaggtgaagatcctttttgataatctcatgaccaaaatcc |
| | cttaacgtgagttttcgttccactgagcgtcagaccccgtagaaaagatcaaaggatctt |
| | cttgagatcctttttttctgcgcgtaatctgctgcttgcaaacaaaaaaaccaccgctac |
| | cagcggtggtttgtttgccggatcaagagctaccaactctttttccgaaggtaactggct |
| | tcagcagagcgcagataccaaatactgtccttctagtgtagccgtagttaggccaccact |
| | tcaagaactctgtagcaccgcctacatacctcgctctgctaatcctgttaccagtggctg |
| | ctgccagtggcgataagtcgtgtcttaccgggttggactcaagacgatagttaccggata |
| | aggcgcagcggtcgggctgaacggggggttcgtgcacacagcccagcttggagcgaacga |
| | cctacaccgaactgagatacctacagcgtgagcattgagaaagcgccacgcttcccgaag |
| | ggagaaaggcggacaggtatccggtaagcggcagggtcggaacaggagagcgcacgaggg |
| | agcttccaggggggaacgcctggtatctttatagtcctgtcgggtttcgccacctctgac |
| | ttgagcgtcgatttttgtgatgctcgtcaggggggccgagcctatggaaaaacgccagca |
| | acgcggcctttttacggttcctggccttttgctggccttttgctcacatgttctttcctg |
| | cgttatcccctgattctgtggataaccgtattaccgcctttgagtgagctgataccgctc |
| | gccgcagccgaacgaccgagcgcagcgagtcagtgagcgaggaagcggaagagcgcccaa |
| | tacgcaaaccgcctctccccgcgcgttggccgattcattaatgcagctggcacgacaggt |
| | ttcccgactggaaagcgggcagtgagcgcaacgcaattaatgtgagttacctcactcatt |
| | aggcaccccaggctttacactttatgcttccggctcctatgttgtgtggaattgtgagcg |
| | gataacaatttcacacaggaaacagctatgaccatgattacgccaagctcggaattaacc |
| | ctcactaaagggaacaaaagctggctagt |

TABLE 9
Features of pYAL_3T Vector

| Feature | Nucleotide Position |
|---|---|
| GAL1 promotor | 5007-450 |
| T7 | 473-494 |
| Aga2 Leader | 534-587 |
| Aga2 | 588-794 |
| Linker | 813-858 |
| CEN-ARS Prs | 2289-2799 |
| Ampr | 3129-3788 |
| Laco | 4908-4930 |

TABLE 10
Features of pCT Vector

| Feature | Position |
|---|---|
| GAL1 promotor | 5217-451 |
| T7 | 475-494 |
| Aga2 Leader | 534-587 |
| linker | 588-632 |
| hB2m | 633-929 |
| linker | 930-989 |
| epitope tag (cMyc) | 990-1019 |
| linker | 1020-1064 |
| Aga2 | 1065-1271 |
| CEN-ARS pRS | 2499-3009 |
| AmpR | 3339-3998 |
| LacO | 5118-5140 |

[0148] Day 1: Passage the two yeast cultures from Day 0 step 3 by adding 100 μl of each of the two yeast cultures to 5 ml of fresh YPD and shake at 30° C. overnight.

[0149] Day 2:
[0150] 1. Measure optical density (OD) of overnight cultures from Day 1.
[0151] 2. Prepare a new culture with 300 ml of an OD 0.3 yeast culture from step 1 using YPD in a 2.5 L baffled flask.
[0152] 3. Prepare 3 ml of 1M Tris pH 8.0/1 M 1,4-dithiothreitol (DTT)
[0153] 4. Prepare 15 ml of 2 M lithium acetate (LiAc)/10 mM Tris, 1 mM EDTA (TE)
[0154] 5. Propagate culture to an OD of 1.6-2.0.
[0155] 6. Add 3 ml of Tris/DTT.
[0156] 7. Add 15 ml of 2 M LiAc/TE.
[0157] 8. Propagate culture at 30° C. for 15 minutes while shaking at 225 rounds per minute (rpm).
[0158] 9. Centrifuge culture at 3000×g for 3 minutes.
[0159] 10. Resuspend the pellet in 50 mL cold E-buffer.
[0160] 11. Centrifuge the suspension from step 10 at 3000×g for 3 min, at 4° C.
[0161] 12. Repeat steps 10 and 11 twice.
[0162] 13. Remove residual buffer.
[0163] 14. Resuspend pellet in 600 μL E-buffer.
[0164] 15. Add the 50 μg insert and 10 μg digested plasmid from step 4 of Day 0, total volume of buffer, insert, plasmid, and yeast should be about 1 mL.
[0165] 16. Aliquot 150 μL of the suspension from step 15 into ice-chilled 2 mm gap electroporation cuvettes.
[0166] 17. Electroporate each cuvette at 2.5 kV. The time constant should be between 3 and 4 ms¹.
[0167] 18. Add three 1 mL volumes of cold YPD, then bring the total volume up to 200 mL with YPD
[0168] 19. Culture electroporated yeast at 30° C. at 225 rpm, for 1 hour in a 250 ml baffled flask.
[0169] 20. Centrifuge culture at 3500×g for 3 minutes to form a yeast cell pellet, decant the supernatant, and re-suspend the yeast cell pellet in 10 mL of SDCAA (dextrose casamino acids, which also includes, yeast nitrogen base without amino acids and with ammonium sulfate, sodium citrate, and citric acid monohydrate, at a pH of 4.5).

[0170] Day 2: Determine Titer
[0171] 1. Add 990 μL of SDCAA to each of four Eppendorf tubes.
[0172] 2. Add 10 μL from step 20 above to one tube containing 990 μL SDCAA.
[0173] 3. Pipet 100 μL of the 10⁴ solution into a tube containing only 990 μL of SDCAA.
[0174] 4. Pipet 100 μL of the 10⁵ solution into a tube containing only 990 μL of SDCAA.
[0175] 5. Pipet 100 μL of the 10⁶ solution into a tube containing only 990 μL of SDCAA.
[0176] 6. Spread 100 μL of each dilution in steps 2-5 onto a separate SDCAA plates and incubate at 30° C. for 3 days. Count the colonies on the plates to determine the titer. From step 2, the colonies counted represent the diversity of the library x 10⁴. From step 3, the colonies counted represent the diversity of the library x 10⁵. From step 4, the colonies counted represent the diversity of the library x 10⁶. From step 5, the colonies counted represent the diversity of the library x 10⁷.
[0177] 7. Add 490 ml of pH 4.5 SDCAA to the remaining cell suspension from step 20 and culture at 30° C. overnight.

[0178] Day 3: Measure the OD of the passage from step 8 after 24 hours. The OD should be at least 5. Passage the culture to an OD of 1 in a total volume of 500 mL SDCAA.

[0179] Day 4: Passage cells to an OD of 1 in a total volume of 500 mL SDCAA.

[0180] Day 5: 72 hours after step 18 from Day 2 was performed, induce in SGCAA (galactose casamino acids, which also includes, yeast nitrogen base without amino acids and with ammonium sulfate, sodium citrate, and citric acid monohydrate, at a pH of 4.5).

[0181] Recipes:
[0182] 1) E-buffer, 500 ml
   [0183] 0.6 g Tris base,
   [0184] 91.09 g Sorbitol (1M)
   [0185] 73.50 mg CaCl2 (1 mM; consider making 1M stock solution) in ddH2O to a final volume of 500 ml, pH to 7.5. Filter through 0.22 μm membrane.
[0186] 2) 1 M Tris/1 M DTT, 3 ml
   [0187] 0.462 g 1,4-dithiothreitol in 3 ml 1 M Tris, pH 8.0 and sterilize by filtration.
[0188] 3) 2 M LiAc/TE solution, 15 ml
   [0189] 1.98 g LiAc in 10 ml of TE (10 mM Tris, 1 mM EDTA), sterilize by filtration.

### Example 3: Characterization of pHLA Expression

[0190] This example describes characterizing expression of HLA-antigen polypeptide complexes on the electroporated yeast cells of Example 2. These expression measurements include FACS analysis to determine the levels of peptide-MHC displayed on the surface of yeast cells and indicate functionality of the random yeast display library. The characterization methods for expression of pHLA on yeast are as follows:

[0191] Materials
[0192] 1. Yeast library from Example 2
[0193] 2. PBSM (1×PBS, 1 g/L bovine serum albumin, EDTA, pH 7.4; filtered)
[0194] 3. Anti-myc (FITC fluorophore-conjugated) antibody
[0195] 4. 96-well U-bottom plate

[0196] Optional:
[0197] 5. Anti-VS (647 fluorophore-conjugated) antibody
[0198] 6. Anti-HA (BV421 fluorophore-conjugated) antibody
[0199] 7. Anti-VSV (PE fluorophore-conjugated) antibody

[0200] Cell Preparation
[0201] 1. Measure optical density of yeast culture on NanoDrop. OD600 readings between 0 to 1 are in the liner range for cultures induced 2 to 3 days at 20° C. at a 1:20 culture:SDCAA dilution.
[0202] 2. Transfer samples of yeast cultures into wells of a 96-well plate. For yeast cultures having an OD600 of about 10, use 254, of the culture. Include single-color and unstained controls.
[0203] 3. Add PBSM to 200 μl final volume to each well.
[0204] 4. Centrifuge the 96-well plate at 2500×g for 2 minutes.
[0205] 5. Remove supernatants.

[0206] Staining Cells
[0207] 1. Re-suspend each cell pellet in 100 μl PBSM
[0208] 2. Add 1 μl antibody as appropriate. 3. Incubate at 4° C., protected from light (e.g., dark) for 30 minutes.

[0209] Washing Cells and Determining pHLA Expression
[0210] 1. Centrifuge the 96-well plate at 2500×g for 2 minutes.
[0211] 2. Remove supernatants.
[0212] 3. Re-suspend each pellet in 200 μl PB SM.
[0213] 4. Centrifuge the 96-well plate at 2500×g for 2 minutes.
[0214] 5. Remove supernatants.
[0215] 6. Re-suspend each pellet in 200 μl PB SM.
[0216] 7. Analyze samples in each well with CytoFlex.

[0217] Results: Expression of the HLA-antigen polypeptide complexes (peptides of SEQ ID Nos: 8, 11, 14, 18, 21+24, 28, 32, 36, 40-44, 47, 50, 53, 56, 65, 75, 69, 77+80, 89, 95, 99, 102+106, 108, 111+114, 117+120, 124, and 125) was determined by flow cytometry and shown in FIG. 4. Antibodies targeting epitope tags expressed by HLA-antigen polypeptide complexes were used to stain electroporated yeast cells. FITC-A staining corresponds to HLA-antigen polypeptide complexes expressing a c-Myc tag. Antibody-epitope tag binding was used as a proxy to determine pHLA expression, which, as shown in FIG. 4, ranged from 8.99% for SEQ ID NO: 56 to 26.3% expression for SEQ ID NOs: 177+180.

### Example 4: Functional Validation of pHLA Expression

[0218] This example describes functionally validating expression of pHLAs on the electroporated yeast cells of Example 2 with a candidate TCR. Expected target antigens of the pHLAs can be identified from up to 6 libraries when the candidate TCR is allotype-matched. The functional validation methods for expression of pHLA on yeast are as follows:

[0219] HLA-antigen polypeptide sequence libraries, such as those disclosed herein, minimally express about 25% of total antigen polypeptide sequences for a single length 9mer peptide presented by HLA-A1 (Gee 2018b) and express less than about 5% of a single length peptide (e.g., 8mer) having mixed length peptides (e.g., 8mer, 9mer, 10 mer, 11 mer) presented by HLA-A2 (Gee 2018a). Despite less than about 5% single length peptide expression of the HLA-antigen polypeptide sequence having 8mer length peptides, isolated TCRs of interest target 8mer antigens from the HLA-antigen polypeptide complexes. These isolated TCR of interest were stimulated by one or more HLA-antigen polypeptide complexes in an in vitro co-culture assay (Gee 2018a; see FIGS. 5C and 7A therein). HLA-antigen polypeptide libraries have been screened and peptides which bind TCRs of known specificity have been isolated (Gee 2018a). While a minimum level of expression that is necessary for a functional HLA-antigen polypeptide library of the present disclosure has not yet been determined, data shows that less than 15% expression can result in an HLA-antigen polypeptide library that is useful with the methods described herein.

[0220] While preferred embodiments of the present invention have been shown and described herein, it will be obvious to those skilled in the art that such embodiments are provided by way of example only. Numerous variations, changes, and substitutions will now occur to those skilled in the art without departing from the invention. It should be understood that various alternatives to the embodiments of the invention described herein may be employed in practicing the invention.

[0221] All publications, patent applications, issued patents, and other documents referred to in this specification are herein incorporated by reference as if each individual publication, patent application, issued patent, or other document was specifically and individually indicated to be incorporated by reference in its entirety. Definitions that are contained in text incorporated by reference are excluded to the extent that they contradict definitions in this disclosure.

### REFERENCES

[0222] Altschul et al. “Basic local alignment search tool.” J Mol Biol 215(3):403-410 (1990) Altschul & Karlin. “Methods for assessing the statistical significance of molecular sequence features by using general scoring schemes.” Proc Natl Acad Sci USA 87(6):2264-2268 (1990)
[0223] Altschul & Karlin. “Applications and statistics for multiple high-scoring segments in molecular sequences.” Proc Natl Acad Sci USA 90(12):5873-5877 (1993)
[0224] Arden et al. “Human T-cell receptor variable gene segment families.” Immunogenetics 42(6):455-500 (1995)
[0225] Bowie et al. “A method to identify protein sequences that fold into a known three-dimensional structure.” Science 253(5016):164-170 (1991)
[0226] Brenner et al. “Population statistics of protein structures: lessons from structural classifications.” Curr Opin Struct Biol 7(3):369-376 (1997)
[0227] Chou & Fasman. “Prediction of protein conformation.” Biochemistry 13(2):222-245 (1974a)
[0228] Chou & Fasman. “Conformational parameters for amino acids in helical, beta-sheet, and random coil regions calculated from proteins.” Biochemistry 113(2):211-222 (1974b)
[0229] Chou & Fasman. “Prediction of the secondary structure of proteins from their amino acid sequence.” Adv Enzymol Relat Areas Mol Biol 47:45-148 (1978a)
[0230] Chou & Fasman. “Empirical predictions of protein conformation.” Annu Rev Biochem 47:251-276 (1978b)
[0231] Chou & Fasman. “Prediction of beta-turns.” Biophys J 26:367-384 (1979)
[0232] Gee et al. “Antigen identification for orphan T cell receptors expressed on tumor-infiltrating lymphocytes.” Cell 172(3):549-563 (2018a)
[0233] Gee et al. “Facile method for screening clinical T cell receptors for off-target peptide-HLA reactivity.” bioRxiv 472480 (2018b)
[0234] Gribskov et al. “Profile analysis: detection of distantly related proteins.” Proc Natl Acad Sci USA 84(13):4355-4358 (1987)
[0235] Gribskov et al. Profile analysis.” Methods Enzymol 183:146-159 (1990)
[0236] Holm & Sander. “Protein folds and families: sequence and structure alignments.” Nucleic Acids Res 27(1):244-247 (1999)
[0237] Jones. “Progress in protein structure prediction.” Curr Opin Struct Biol 7(3):377-87 (1997)
[0238] Jones et. al. “Engineering and Characterization of a Stabilized α1/α2 Module of the Class I Major Histocompatibility Complex Product L.” J. of Biol. Chem. 281(35):25734-25744 (2006)
[0239] Kotsiou et al. “Properties and Applications of Single-Chain Major Histocompatibility Complex Class I Molecule.” Antioxid. Redox Signal. 15(3):645-655 (2011)
[0240] Kyte & Doolittle. “A simple method for displaying the hydropathic character of a protein.” J Mol Biol 157(1):105-132 (1982)
[0241] Mackelprang et al. “Sequence diversity, natural selection and linkage disequilibrium in the human T cell receptor alpha/delta locus.” Hum Genet 119(3):255-266 (2006)
[0242] MacLennan et al. “Structure-function relationships in the Ca(2+)-binding and translocation domain of SERCA1: physiological correlates in Brody disease.” Acta Physiol Scand Suppl 643:55-67 (1998)
[0243] Margulies et al. “Genome sequencing in microfabricated high-density picolitre reactors.” Nature 437(7057):376-380 (2005)
[0244] Mottez et al. “Cells Expressing a Major Histocompatibility Complex Class I Molecule with a Single Covalently Bound Peptide Are Highly Immunogenic.” J. Exp. Med. 181: 493-502 (1995)
[0245] Moult. “The current state of the art in protein structure prediction.” Curr Opin Biotechnol 7(4):422-427 (1996)
[0246] Pandey et al. “Current strategies for protein production and purification enabling membrane protein structural biology.” Biochem Cell Biol. 94(6) 507-527 (2016)
[0247] Rowen et al. “The complete 685-kilobase DNA sequence of the human beta T cell receptor locus.” Science 272(5269):1755-1762 (1996)
[0248] Sasaki & Sutoh. “Structure-mutation analysis of the ATPase site of Dictyostelium discoideum myosin II.” Adv Biophys 35:1-24 (1998)
[0249] Sippl & Flockner. “Threading thrills and threats.” Structure 4(1):15-19 (1996)
[0250] Tafuro et al. “Reconstitution of Antigen Presentation in HLA Class I-Negative Cancer Cells with Peptide-β2m Fusion Molecules.” Eur. J. Immunol. 31: 440-449 (2001)
[0251] White et al. “Soluble Class I MHC with β2-Microglobulin Covalently Linked Peptides: Specific Binding to a T Cell Hybridoma.” J. Immunol. 162: 2671-2676 (1999)

1. An antigen screening library comprising a plurality of Human Leukocyte Antigen (HLA)-antigen polypeptide complexes, the HLA-antigen polypeptide complexes comprising:
a) an HLA polypeptide, the HLA polypeptide comprising a peptide binding cleft;
b) a randomized antigen polypeptide comprising an amino acid sequence set forth in any one of SEQ ID NOs: 1 to 209, wherein the randomized antigen polypeptide specifically binds to the peptide binding cleft of the HLA polypeptide; and
c) a Beta-2 (β2) microglobulin polypeptide.

2. The antigen screening library of claim 1, wherein the plurality of HLA-antigen complexes comprises an HLA polypeptide selected from the list consisting of A3, A11, A23, A24, A26, A30, A31, A33, A68, B7, B8, B15, B27, B40, B44, B51, B53, B57, C1, C2, C3, C4, C5, C6, C7, C8, and E.

3. The antigen screening library of claim 1, wherein the plurality of HLA-antigen complexes comprises at least five, ten, fifteen, twenty, or twenty-five different HLA polypeptides selected from the list consisting of A3, A11, A23, A24, A26, A30, A31, A33, A68, B7, B8, B15, B27, B40, B44, B51, B53, C1, C2, C3, C4, C5, C6, C7, C8, and E.

4. The antigen screening library of claim 1, wherein the plurality of HLA-antigen complexes comprises all of A3, A11, A23, A24, A26, A30, A31, A33, A68, B7, B8, B15, B27, B40, B44, B51, B53, C1, C2, C3, C4, C5, C6, C7, C8, and E HLA polypeptides.

5. The antigen screening library of claim 1, wherein the plurality of HLA-antigen complexes comprises an HLA polypeptide comprising an amino acid sequence at least 87.5%, 90%, 95%, 97%, 98%, 99%, or 100% identical to an amino acid sequence set forth in any one of SEQ ID NOs: 427 to 455.

6. The antigen screening library of any one of claims 1 to 5, wherein the plurality of the HLA-antigen polypeptide complexes comprises at least about 10⁵ different HLA-antigen polypeptide complexes comprising at least about 10⁵ different randomized antigen polypeptides.

7. The antigen screening library of any one of claims 1 to 6, wherein the HLA polypeptide, the randomized antigen polypeptide, and the β2-microglobulin polypeptide comprise a single polypeptide.

8. The antigen screening library of claim 7, wherein the single polypeptide further comprises a first flexible polypeptide linker and a second flexible polypeptide linker.

9. The antigen screening library of claim 8, wherein the randomized antigen polypeptide is N-terminal to the HLA polypeptide on the single polypeptide, and the HLA polypeptide is N-terminal to the β2-microglobulin polypeptide on the single polypeptide.

10. The antigen screening library of claim 9, wherein the first flexible polypeptide linker separates the HLA polypeptide from the randomized antigen polypeptide, and a second flexible polypeptide linker separates the HLA polypeptide from the β2-microglobulin polypeptide.

11. The antigen screening library of claim 8, wherein the randomized antigen polypeptide is C-terminal to the HLA polypeptide on the single polypeptide, and the HLA polypeptide is N-terminal to the β2-microglobulin polypeptide on the single polypeptide.

12. The antigen screening library of claim 11, wherein the first flexible polypeptide linker separates the HLA polypeptide from the randomized antigen polypeptide, and a second flexible polypeptide linker separates the HLA polypeptide from the β2-microglobulin polypeptide.

13. The antigen screening library of claim 8, wherein the randomized antigen polypeptide is N-terminal to the HLA polypeptide on the single polypeptide, and the HLA polypeptide is C-terminal to the β2-microglobulin polypeptide on the single polypeptide.

14. The antigen screening library of claim 13, wherein the first flexible polypeptide linker separates the randomized antigen polypeptide from the β2-microglobulin polypeptide, and a second flexible polypeptide linker separates the β2-microglobulin polypeptide from the HLA polypeptide.

15. The antigen screening library of claim 8, wherein the randomized antigen polypeptide is C-terminal to the HLA polypeptide on the single polypeptide, and the HLA polypeptide is C-terminal to the β2-microglobulin polypeptide on the single polypeptide.

16. The antigen screening library of claim 15, wherein the first flexible polypeptide linker separates the HLA polypeptide from the β2-microglobulin polypeptide, and a second flexible polypeptide linker separates the randomized antigen polypeptide from the HLA polypeptide.

17. The antigen screening library of claim 8, wherein the β2-microglobulin polypeptide is C-terminal to the HLA polypeptide on the single polypeptide, and the HLA polypeptide is N-terminal to the randomized antigen polypeptide on the single polypeptide.

18. The antigen screening library of claim 17, wherein the first flexible polypeptide linker separates the HLA polypeptide from the randomized antigen polypeptide, and a second flexible polypeptide linker separates the randomized antigen polypeptide from the β2-microglobulin polypeptide.

19. The antigen screening library of claim 8, wherein the randomized antigen polypeptide is C-terminal to the β2-microglobulin on the single polypeptide, and the HLA polypeptide is C-terminal to the randomized antigen polypeptide on the single polypeptide.

20. The antigen screening library of claim 19, wherein the first flexible polypeptide linker separates the β2-microglobulin polypeptide from the randomized antigen polypeptide, and a second flexible polypeptide linker separates the randomized antigen polypeptide from the HLA polypeptide.

21. The antigen screening library of any one of claims 1 to 20, wherein each of the HLA-antigen complexes of the plurality of the HLA-antigen complexes do not comprise an epitope tag.

22. The antigen screening library of any one of claims 1 to 20, wherein at least one of the HLA-antigen complexes of the plurality of HLA-antigen complexes comprise an epitope tag.

23. The antigen screening library of any one of claims 1 to 20, wherein at least one of the HLA-antigen complexes of the plurality of HLA-antigen complexes does not comprise an epitope tag and at least one of the HLA-antigen complexes of the plurality of HLA-antigen complexes does comprise an epitope tag.

24. The antigen screening library of claim 22 or 23, wherein the epitope tag comprises a FLAG tag, a c-Myc tag, a HIS-tag, a hemagglutinin (HA) tag, a VSVg tag, or a V5 tag.

25. The antigen screening library of any one of claims 1 to 24, wherein the HLA-antigen complexes each comprise a membrane tethering domain.

26. The antigen screening library of claim 25, wherein the membrane tethering domain comprises Aga2.

27. The antigen screening library of any one of claims 1 to 26, wherein the antigen screening library is expressed on a plurality of cells.

28. The antigen screening library of claim 27, wherein the plurality of cells are a plurality of yeast cells.

29. The antigen screening library of claim 28, wherein the plurality of yeast cells are a plurality of yeast cells of the EBY100 strain of Saccharomyces cerevisiae.

30. The antigen screening library of any one of claims 27 to 29, wherein each cell of the plurality of cells expresses a specific HLA-antigen complex.

31. An antigen screening library comprising a plurality of Human Leukocyte Antigen (HLA)-antigen polypeptide complexes, the HLA-antigen polypeptide complexes comprising:
a) an HLA polypeptide, the HLA polypeptide comprising a peptide binding cleft; and
b) a randomized antigen polypeptide comprising an amino acid sequence set forth in any one of SEQ ID NOs: 1 to 209, wherein the randomized antigen polypeptide specifically binds to the peptide binding cleft of the HLA polypeptide.

32. The antigen screening library of claim 31, wherein the plurality of HLA-antigen complexes comprises an HLA polypeptide selected from the list consisting of A3, A11, A23, A24, A26, A30, A31, A33, A68, B7, B8, B15, B27, B40, B44, B51, B53, B57, C1, C2, C3, C4, C5, C6, C7, C8, and E.

33. The antigen screening library of claim 31, wherein the plurality of HLA-antigen complexes comprises at least five, ten, fifteen, twenty, or twenty-five different HLA polypeptides selected from the list consisting of A3, A11, A23, A24, A26, A30, A31, A33, A68, B7, B8, B15, B27, B40, B44, B51, B53, C1, C2, C3, C4, C5, C6, C7, C8, and E.

34. The antigen screening library of claim 31, wherein the plurality of HLA-antigen complexes comprises all of A3, A11, A23, A24, A26, A30, A31, A33, A68, B7, B8, B15, B27, B40, B44, B51, B53, C1, C2, C3, C4, C5, C6, C7, C8, and E HLA polypeptides.

35. The antigen screening library of claim 31, wherein the plurality of HLA-antigen complexes comprises an HLA polypeptide comprising an amino acid sequence at least 87.5%, 90%, 95%, 97%, 98%, 99%, or 100% identical to an amino acid sequence set forth in any one of SEQ ID NOs: 427 to 455.

36. The antigen screening library of any one of claims 31 to 35, wherein the plurality of the HLA-antigen polypeptide complexes comprises at least about 10⁵ different HLA-antigen polypeptide complexes comprising at least about 10⁵ different randomized antigen polypeptides.

37. The antigen screening library of any one of claims 31 to 36, wherein the HLA polypeptide, and the randomized antigen polypeptide comprise a single polypeptide.

38. The antigen screening library of claim 37, wherein the single polypeptide further comprises a first flexible polypeptide linker separating the HLA polypeptide from the randomized antigen polypeptide.

39. The antigen screening library of claim 38, wherein the randomized antigen polypeptide is N-terminal to the HLA polypeptide on the single polypeptide.

40. The antigen screening library of claim 38, wherein the randomized antigen polypeptide is C-terminal to the HLA polypeptide on the single polypeptide.

41. The antigen screening library of any one of claims 31 to 40, wherein each of the HLA-antigen complexes of the plurality of the HLA-antigen complexes do not comprise an epitope tag.

42. The antigen screening library of any one of claims 31 to 40, wherein at least one of the HLA-antigen complexes of the plurality of HLA-antigen complexes comprise an epitope tag.

43. The antigen screening library of any one of claims 31 to 40, wherein at least one of the HLA-antigen complexes of the plurality of HLA-antigen complexes does not comprise an epitope tag and at least one of the HLA-antigen complexes of the plurality of HLA-antigen complexes does comprise an epitope tag.

44. The antigen screening library of claim 42 or 43, wherein the epitope tag comprises a FLAG tag, a c-Myc tag, a HIS-tag, a hemagglutinin (HA) tag, a VSVg tag, or a V5 tag.

45. The antigen screening library of any one of claims 31 to 44, wherein the HLA-antigen complexes each comprise a membrane tethering domain.

46. The antigen screening library of claim 45, wherein the membrane tethering domain comprises Aga2.

47. The antigen screening library of any one of claims 31 to 46, wherein the antigen screening library is expressed on a plurality of cells.

48. The antigen screening library of claim 47, wherein the plurality of cells are a plurality of yeast cells.

49. The antigen screening library of claim 48, wherein the plurality of yeast cells are a plurality of yeast cells of the EBY100 strain of Saccharomyces cerevisiae.

50. The antigen screening library of any one of claims 47 to 49, wherein each cell of the plurality of cells expresses a specific HLA-antigen complex.

51. The antigen screening library of any one of claims 47 to 50, wherein each cell of the plurality of cells expresses a β2-microglobulin polypeptide.

52. An antigen screening library comprising
a) a plurality of antigen polypeptide-Beta-2 (β2) microglobulin polypeptide complexes, the antigen polypeptide-Beta-2 (β2) microglobulin polypeptide complexes comprising:
i) a randomized antigen polypeptide comprising an amino acid sequence set forth in any one of SEQ ID NOs: 1 to 209, wherein the randomized antigen polypeptide specifically binds to the peptide binding cleft of the HLA polypeptide; and
ii) a Beta-2 (β2) microglobulin polypeptide; and
b) a plurality of HLA polypeptides constitutively expressed by one or more yeast cells and comprising a peptide binding cleft.

53. The antigen screening library of claim 52, wherein the plurality of HLA polypeptides is selected from the list consisting of A3, A11, A23, A24, A26, A30, A31, A33, A68, B7, B8, B15, B27, B40, B44, B51, B53, B57, C1, C2, C3, C4, C5, C6, C7, C8, and E.

54. The antigen screening library of claim 52, wherein the plurality of HLA polypeptides comprises at least five, ten, fifteen, twenty, or twenty-five different HLA polypeptides selected from the list consisting of A3, A11, A23, A24, A26, A30, A31, A33, A68, B7, B8, B15, B27, B40, B44, B51, B53, C1, C2, C3, C4, C5, C6, C7, C8, and E.

55. The antigen screening library of claim 52, wherein the plurality of HLA polypeptides comprises all of A3, A11, A23, A24, A26, A30, A31, A33, A68, B7, B8, B15, B27, B40, B44, B51, B53, C1, C2, C3, C4, C5, C6, C7, C8, and E HLA polypeptides.

56. The antigen screening library of claim 52, wherein the plurality of HLA polypeptides comprises an HLA polypeptide comprising an amino acid sequence at least 87.5%, 90%, 95%, 97%, 98%, 99%, or 100% identical to an amino acid sequence set forth in any one of SEQ ID NOs: 427 to 455.

57. The antigen screening library of any one of claims 52 to 56, wherein the plurality of the antigen polypeptide-Beta-2 (β2) microglobulin polypeptide complexes comprises at least about 10⁵ different antigen polypeptide-Beta-2 (β2) microglobulin polypeptide complexes comprising at least about 10⁵ different randomized antigen polypeptides.

58. The antigen screening library of any one of claims 52 to 57, wherein the randomized antigen polypeptide and the β2-microglobulin polypeptide comprise a single polypeptide.

59. The antigen screening library of claim 58, wherein the single polypeptide further comprises a first flexible polypeptide linker.

60. The antigen screening library of claim 59, wherein the randomized antigen polypeptide is N-terminal to the β2-microglobulin polypeptide on the single polypeptide.

61. The antigen screening library of claim 60, wherein the randomized antigen polypeptide is C-terminal to the β2-microglobulin polypeptide on the single polypeptide.

62. The antigen screening library of any one of claims 52 to 61, wherein each of the antigen polypeptide-Beta-2 (β2) microglobulin polypeptide complexes of the plurality of the antigen polypeptide-Beta-2 (β2) microglobulin polypeptide complexes do not comprise an epitope tag.

63. The antigen screening library of any one of claims 52 to 61, wherein at least one of the antigen polypeptide-Beta-2 (β2) microglobulin polypeptide complexes of the plurality of antigen polypeptide-Beta-2 (β2) microglobulin polypeptide complexes comprise an epitope tag.

64. The antigen screening library of any one of claims 52 to 61, wherein at least one of the HLA-antigen complexes of the plurality of HLA-antigen complexes does not comprise an epitope tag and at least one of the HLA-antigen complexes of the plurality of HLA-antigen complexes does comprise an epitope tag.

65. The antigen screening library of claim 63 or 64, wherein the epitope tag comprises a FLAG tag, a c-Myc tag, a HIS-tag, a hemagglutinin (HA) tag, a VSVg tag, or a V5 tag.

66. The antigen screening library of any one of claims 52 to 65, wherein the antigen polypeptide-Beta-2 (β2) microglobulin polypeptide complexes each comprise a membrane tethering domain.

67. The antigen screening library of claim 66, wherein the membrane tethering domain comprises Aga2.

68. The antigen screening library of any one of claims 52 to 67, wherein the antigen screening library is expressed on a plurality of cells.

69. The antigen screening library of claim 68, wherein the plurality of cells are a plurality of yeast cells.

70. The antigen screening library of claim 69, wherein the plurality of yeast cells are a plurality of yeast cells of the EBY100 strain of Saccharomyces cerevisiae.

71. The antigen screening library of any one of claims 68 to 70, wherein each cell of the plurality of cells expresses a specific antigen polypeptide-Beta-2 (β2) microglobulin polypeptide complex.

72. A plurality of nucleic acids encoding the antigen screening library of any one of claims 1 to 71.

73. The plurality of nucleic acids of claim 72, wherein the HLA polypeptide is encoded by a nucleic acid that is at least about 85%, 87.5%, 90%, 95%, 97%, 98%, or 99% homologous to any one of SEQ ID NOs: 456 to 484.

74. The plurality of nucleic acids of claim 73, wherein the randomized antigen polypeptide is encoded by a nucleic acid set forth in any one of SEQ ID NOs: 210 to 426.

75. The plurality of nucleic acids of any one of claims 72 to 74, wherein the plurality of nucleic acids is expressed by a plurality of cells.

76. A plurality of cells expressing the antigen screening library of any one of claims 1 to 75.

77. The plurality of cells of claim 76, wherein the plurality of cells is a plurality of yeast cells.

78. The plurality of cells of claim 77, wherein the plurality of yeast cells is a plurality of cells of the EBY100 strain of Saccharomyces cerevisiae.

79. The plurality of cells of any one of claims 76 to 78, wherein each cell of the plurality of cells comprises a nucleic acid of the plurality of nucleic acids encoding a specific of HLA-antigen complex.

80. A method of selecting an antigen comprising contacting the plurality of cells of any one of claims 76 to 79 with a T cell receptor (TCR) or other macromolecule having one or more antigen binding domains.

81. The method of claim 80, wherein the TCR or other macromolecule having one or more antigen binding domains is immobilized on a substrate.

82. The method of claim 80, wherein the TCR or other macromolecule having one or more antigen binding domains is expressed by a cell.

83. The method of any one of claims 76 to 79, wherein the selection is repeated for 2, 3, 4, or 5 cycles.

84. The method of claim 83, wherein the antigen is a polypeptide antigen.

85. The method of claim 84, wherein the antigen is a polypeptide antigen that does not naturally occur.

86. The method of claim 85, wherein the antigen is a polypeptide antigen that does not naturally occur in a human.

The application's sequence listing, which the Patent Office published only in electronic form, follows.

SEQUENCE LISTING (487 sequences)

SEQ ID NO: 1 - protein, 8 aa, Artificial Sequence
  Description of Artificial Sequence: Synthetic peptide
  MOD_RES (1)..(1): Any amino acid
  MOD_RES (2)..(2): Val, Leu or Met
  MOD_RES (3)..(3): Any amino acid
  MOD_RES (4)..(4): Any amino acid
  MOD_RES (5)..(5): Any amino acid
  MOD_RES (6)..(6): Any amino acid
  MOD_RES (7)..(7): Any amino acid
XXXXXXXK

SEQ ID NO: 2 - protein, 9 aa, Artificial Sequence
  Description of Artificial Sequence: Synthetic peptide
  MOD_RES (1)..(1): Any amino acid
  MOD_RES (2)..(2): Val, Leu or Met
  MOD_RES (3)..(3): Any amino acid
  MOD_RES (4)..(4): Any amino acid
  MOD_RES (5)..(5): Any amino acid
  MOD_RES (6)..(6): Any amino acid
  MOD_RES (7)..(7): Any amino acid
  MOD_RES (8)..(8): Any amino acid
XXXXXXXXK

SEQ ID NO: 3 - protein, 10 aa, Artificial Sequence
  Description of Artificial Sequence: Synthetic peptide
  MOD_RES (1)..(1): Any amino acid
  MOD_RES (2)..(2): Val, Leu or Met
  MOD_RES (3)..(3): Any amino acid
  MOD_RES (4)..(4): Any amino acid
  MOD_RES (5)..(5): Any amino acid
  MOD_RES (6)..(6): Any amino acid
  MOD_RES (7)..(7): Any amino acid
  MOD_RES (8)..(8): Any amino acid
  MOD_RES (9)..(9): Any amino acid
XXXXXXXXXK

SEQ ID NO: 4 - protein, 11 aa, Artificial Sequence
  Description of Artificial Sequence: Synthetic peptide
  MOD_RES (1)..(1): Any amino acid
  MOD_RES (2)..(2): Val, Leu or Met
  MOD_RES (3)..(3): Any amino acid
  MOD_RES (4)..(4): Any amino acid
  MOD_RES (5)..(5): Any amino acid
  MOD_RES (6)..(6): Any amino acid
  MOD_RES (7)..(7): Any amino acid
  MOD_RES (8)..(8): Any amino acid
  MOD_RES (9)..(9): Any amino acid
  MOD_RES (10)..(10): Any amino acid
XXXXXXXXXXK

SEQ ID NO: 5 - protein, 12 aa, Artificial Sequence
  Description of Artificial Sequence: Synthetic peptide
  MOD_RES (1)..(1): Any amino acid
  MOD_RES (2)..(2): Val, Leu or Met
  MOD_RES (3)..(3): Any amino acid
  MOD_RES (4)..(4): Any amino acid
  MOD_RES (5)..(5): Any amino acid
  MOD_RES (6)..(6): Any amino acid
  MOD_RES (7)..(7): Any amino acid
  MOD_RES (8)..(8): Any amino acid
  MOD_RES (9)..(9): Any amino acid
  MOD_RES (10)..(10): Any amino acid
  MOD_RES (11)..(11): Any amino acid
XXXXXXXXXXXK

SEQ ID NO: 6 - protein, 8 aa, Artificial Sequence
  Description of Artificial Sequence: Synthetic peptide
  MOD_RES (1)..(1): Any amino acid
  MOD_RES (2)..(2): Val, Leu or Phe
  MOD_RES (3)..(3): Any amino acid
  MOD_RES (4)..(4): Any amino acid
  MOD_RES (5)..(5): Any amino acid
  MOD_RES (6)..(6): Any amino acid
  MOD_RES (7)..(7): Any amino acid
  MOD_RES (8)..(8): Lys or Arg
XXXXXXXX

SEQ ID NO: 7 - protein, 9 aa, Artificial Sequence
  Description of Artificial Sequence: Synthetic peptide
  MOD_RES (1)..(1): Any amino acid
  MOD_RES (2)..(2): Val, Leu or Phe
  MOD_RES (3)..(3): Any amino acid
  MOD_RES (4)..(4): Any amino acid
  MOD_RES (5)..(5): Any amino acid
  MOD_RES (6)..(6): Any amino acid
  MOD_RES (7)..(7): Any amino acid
  MOD_RES (8)..(8): Any amino acid
  MOD_RES (9)..(9): Lys or Arg
XXXXXXXXX

SEQ ID NO: 8 - protein, 10 aa, Artificial Sequence
  Description of Artificial Sequence: Synthetic peptide
  MOD_RES (1)..(1): Any amino acid
  MOD_RES (2)..(2): Val, Leu or Phe
  MOD_RES (3)..(3): Any amino acid
  MOD_RES (4)..(4): Any amino acid
  MOD_RES (5)..(5): Any amino acid
  MOD_RES (6)..(6): Any amino acid
  MOD_RES (7)..(7): Any amino acid
  MOD_RES (8)..(8): Any amino acid
  MOD_RES (9)..(9): Any amino acid
  MOD_RES (10)..(10): Lys or Arg
XXXXXXXXXX

SEQ ID NO: 9 - protein, 11 aa, Artificial Sequence
  Description of Artificial Sequence: Synthetic peptide
  MOD_RES (1)..(1): Any amino acid
  MOD_RES (2)..(2): Val, Leu or Phe
  MOD_RES (3)..(3): Any amino acid
  MOD_RES (4)..(4): Any amino acid
  MOD_RES (5)..(5): Any amino acid
  MOD_RES (6)..(6): Any amino acid
  MOD_RES (7)..(7): Any amino acid
  MOD_RES (8)..(8): Any amino acid
  MOD_RES (9)..(9): Any amino acid
  MOD_RES (10)..(10): Any amino acid
  MOD_RES (11)..(11): Lys or Arg
XXXXXXXXXXX

SEQ ID NO: 10 - protein, 12 aa, Artificial Sequence
  Description of Artificial Sequence: Synthetic peptide
  MOD_RES (1)..(1): Any amino acid
  MOD_RES (2)..(2): Val, Leu or Phe
  MOD_RES (3)..(3): Any amino acid
  MOD_RES (4)..(4): Any amino acid
  MOD_RES (5)..(5): Any amino acid
  MOD_RES (6)..(6): Any amino acid
  MOD_RES (7)..(7): Any amino acid
  MOD_RES (8)..(8): Any amino acid
  MOD_RES (9)..(9): Any amino acid
  MOD_RES (10)..(10): Any amino acid
  MOD_RES (11)..(11): Any amino acid
  MOD_RES (12)..(12): Lys or Arg
XXXXXXXXXXXX

SEQ ID NO: 11 - protein, 8 aa, Artificial Sequence
  Description of Artificial Sequence: Synthetic peptide
  MOD_RES (1)..(1): Any amino acid
  MOD_RES (2)..(2): Any amino acid
  MOD_RES (3)..(3): Any amino acid
  MOD_RES (4)..(4): Any amino acid
  MOD_RES (5)..(5): Any amino acid
  MOD_RES (6)..(6): Any amino acid
  MOD_RES (7)..(7): Any amino acid
XXXXXXXY

SEQ ID NO: 12 - protein, 9 aa, Artificial Sequence
  Description of Artificial Sequence: Synthetic peptide
  MOD_RES (1)..(1): Any amino acid
  MOD_RES (2)..(2): Any amino acid
  MOD_RES (3)..(3): Any amino acid
  MOD_RES (4)..(4): Any amino acid
  MOD_RES (5)..(5): Any amino acid
  MOD_RES (6)..(6): Any amino acid
  MOD_RES (7)..(7): Any amino acid
  MOD_RES (8)..(8): Any amino acid
XXXXXXXXY

SEQ ID NO: 13 - protein, 10 aa, Artificial Sequence
  Description of Artificial Sequence: Synthetic peptide
  MOD_RES (1)..(1): Any amino acid
  MOD_RES (2)..(2): Any amino acid
  MOD_RES (3)..(3): Any amino acid
  MOD_RES (4)..(4): Any amino acid
  MOD_RES (5)..(5): Any amino acid
  MOD_RES (6)..(6): Any amino acid
  MOD_RES (7)..(7): Any amino acid
  MOD_RES (8)..(8): Any amino acid
  MOD_RES (9)..(9): Any amino acid
XXXXXXXXXY

SEQ ID NO: 14 - protein, 11 aa, Artificial Sequence
  Description of Artificial Sequence: Synthetic peptide
  MOD_RES (1)..(1): Any amino acid
  MOD_RES (2)..(2): Any amino acid
  MOD_RES (3)..(3): Any amino acid
  MOD_RES (4)..(4): Any amino acid
  MOD_RES (5)..(5): Any amino acid
  MOD_RES (6)..(6): Any amino acid
  MOD_RES (7)..(7): Any amino acid
  MOD_RES (8)..(8): Any amino acid
  MOD_RES (9)..(9): Any amino acid
  MOD_RES (10)..(10): Any amino acid
XXXXXXXXXXY

SEQ ID NO: 15 - protein, 12 aa, Artificial Sequence
  Description of Artificial Sequence: Synthetic peptide
  MOD_RES (1)..(1): Any amino acid
  MOD_RES (2)..(2): Any amino acid
  MOD_RES (3)..(3): Any amino acid
  MOD_RES (4)..(4): Any amino acid
  MOD_RES (5)..(5): Any amino acid
  MOD_RES (6)..(6): Any amino acid
  MOD_RES (7)..(7): Any amino acid
  MOD_RES (8)..(8): Any amino acid
  MOD_RES (9)..(9): Any amino acid
  MOD_RES (10)..(10): Any amino acid
  MOD_RES (11)..(11): Any amino acid
XXXXXXXXXXXY

SEQ ID NO: 16 - protein, 8 aa, Artificial Sequence
  Description of Artificial Sequence: Synthetic peptide
  MOD_RES (1)..(1): Any amino acid
  MOD_RES (2)..(2): Phe or Tyr
  MOD_RES (3)..(3): Any amino acid
  MOD_RES (4)..(4): Any amino acid
  MOD_RES (5)..(5): Any amino acid
  MOD_RES (6)..(6): Any amino acid
  MOD_RES (7)..(7): Any amino acid
  MOD_RES (8)..(8): Ile, Leu or Phe
XXXXXXXX

SEQ ID NO: 17 - protein, 9 aa, Artificial Sequence
  Description of Artificial Sequence: Synthetic peptide
  MOD_RES (1)..(1): Any amino acid
  MOD_RES (2)..(2): Phe or Tyr
  MOD_RES (3)..(3): Any amino acid
  MOD_RES (4)..(4): Any amino acid
  MOD_RES (5)..(5): Any amino acid
  MOD_RES (6)..(6): Any amino acid
  MOD_RES (7)..(7): Any amino acid
  MOD_RES (8)..(8): Any amino acid
  MOD_RES (9)..(9): Ile, Leu or Phe
XXXXXXXXX

SEQ ID NO: 18 - protein, 10 aa, Artificial Sequence
  Description of Artificial Sequence: Synthetic peptide
  MOD_RES (1)..(1): Any amino acid
  MOD_RES (2)..(2): Phe or Tyr
  MOD_RES (3)..(3): Any amino acid
  MOD_RES (4)..(4): Any amino acid
  MOD_RES (5)..(5): Any amino acid
  MOD_RES (6)..(6): Any amino acid
  MOD_RES (7)..(7): Any amino acid
  MOD_RES (8)..(8): Any amino acid
  MOD_RES (9)..(9): Any amino acid
  MOD_RES (10)..(10): Ile, Leu or Phe
XXXXXXXXXX

SEQ ID NO: 19 - protein, 11 aa, Artificial Sequence
  Description of Artificial Sequence: Synthetic peptide
  MOD_RES (1)..(1): Any amino acid
  MOD_RES (2)..(2): Phe or Tyr
  MOD_RES (3)..(3): Any amino acid
  MOD_RES (4)..(4): Any amino acid
  MOD_RES (5)..(5): Any amino acid
  MOD_RES (6)..(6): Any amino acid
  MOD_RES (7)..(7): Any amino acid
  MOD_RES (8)..(8): Any amino acid
  MOD_RES (9)..(9): Any amino acid
  MOD_RES (10)..(10): Any amino acid
  MOD_RES (11)..(11): Ile, Leu or Phe
XXXXXXXXXXX

SEQ ID NO: 20 - protein, 12 aa, Artificial Sequence
  Description of Artificial Sequence: Synthetic peptide
  MOD_RES (1)..(1): Any amino acid
  MOD_RES (2)..(2): Phe or Tyr
  MOD_RES (3)..(3): Any amino acid
  MOD_RES (4)..(4): Any amino acid
  MOD_RES (5)..(5): Any amino acid
  MOD_RES (6)..(6): Any amino acid
  MOD_RES (7)..(7): Any amino acid
  MOD_RES (8)..(8): Any amino acid
  MOD_RES (9)..(9): Any amino acid
  MOD_RES (10)..(10): Any amino acid
  MOD_RES (11)..(11): Any amino acid
  MOD_RES (12)..(12): Ile, Leu or Phe
XXXXXXXXXXXX

SEQ ID NO: 21 - protein, 8 aa, Artificial Sequence
  Description of Artificial Sequence: Synthetic peptide
  MOD_RES (1)..(1): Any amino acid
  MOD_RES (2)..(2): Val, Leu or Phe
  MOD_RES (3)..(3): Any amino acid
  MOD_RES (4)..(4): Any amino acid
  MOD_RES (5)..(5): Any amino acid
  MOD_RES (6)..(6): Any amino acid
  MOD_RES (7)..(7): Any amino acid
  MOD_RES (8)..(8): Phe or Tyr
XXXXXXXX

SEQ ID NO: 22 - protein, 8 aa, Artificial Sequence
  Description of Artificial Sequence: Synthetic peptide
  MOD_RES (1)..(1): Any amino acid
  MOD_RES (2)..(2): Ile or Thr
  MOD_RES (3)..(3): Any amino acid
  MOD_RES (4)..(4): Any amino acid
  MOD_RES (5)..(5): Any amino acid
  MOD_RES (6)..(6): Any amino acid
  MOD_RES (7)..(7): Any amino acid
  MOD_RES (8)..(8): Phe or Tyr
XXXXXXXX

SEQ ID NO: 23 - protein, 9 aa, Artificial Sequence
  Description of Artificial Sequence: Synthetic peptide
  MOD_RES (1)..(1): Any amino acid
  MOD_RES (2)..(2): Val, Leu or Phe
  MOD_RES (3)..(3): Any amino acid
  MOD_RES (4)..(4): Any amino acid
  MOD_RES (5)..(5): Any amino acid
  MOD_RES (6)..(6): Any amino acid
  MOD_RES (7)..(7): Any amino acid
  MOD_RES (8)..(8): Any amino acid
  MOD_RES (9)..(9): Phe or Tyr
XXXXXXXXX

SEQ ID NO: 24 - protein, 9 aa, Artificial Sequence
  Description of Artificial Sequence: Synthetic peptide
  MOD_RES (1)..(1): Any amino acid
  MOD_RES (2)..(2): Ile or Thr
  MOD_RES (3)..(3): Any amino acid
  MOD_RES (4)..(4): Any amino acid
  MOD_RES (5)..(5): Any amino acid
  MOD_RES (6)..(6): Any amino acid
  MOD_RES (7)..(7): Any amino acid
  MOD_RES (8)..(8): Any amino acid
  MOD_RES (9)..(9): Phe or Tyr
XXXXXXXXX

SEQ ID NO: 25 - protein, 10 aa, Artificial Sequence
  Description of Artificial Sequence: Synthetic peptide
  MOD_RES (1)..(1): Any amino acid
  MOD_RES (2)..(2): Val, Leu or Phe
  MOD_RES (3)..(3): Any amino acid
  MOD_RES (4)..(4): Any amino acid
  MOD_RES (5)..(5): Any amino acid
  MOD_RES (6)..(6): Any amino acid
  MOD_RES (7)..(7): Any amino acid
  MOD_RES (8)..(8): Any amino acid
  MOD_RES (9)..(9): Any amino acid
  MOD_RES (10)..(10): Phe or Tyr
XXXXXXXXXX

SEQ ID NO: 26 - protein, 10 aa, Artificial Sequence
  Description of Artificial Sequence: Synthetic peptide
  MOD_RES (1)..(1): Any amino acid
  MOD_RES (2)..(2): Ile or Thr
  MOD_RES (3)..(3): Any amino acid
  MOD_RES (4)..(4): Any amino acid
  MOD_RES (5)..(5): Any amino acid
  MOD_RES (6)..(6): Any amino acid
  MOD_RES (7)..(7): Any amino acid
  MOD_RES (8)..(8): Any amino acid
  MOD_RES (9)..(9): Any amino acid
  MOD_RES (10)..(10): Phe or Tyr
XXXXXXXXXX

SEQ ID NO: 27 - protein, 11 aa, Artificial Sequence
  Description of Artificial Sequence: Synthetic peptide
  MOD_RES (1)..(1): Any amino acid
  MOD_RES (2)..(2): Val, Leu or Phe
  MOD_RES (3)..(3): Any amino acid
  MOD_RES (4)..(4): Any amino acid
  MOD_RES (5)..(5): Any amino acid
  MOD_RES (6)..(6): Any amino acid
  MOD_RES (7)..(7): Any amino acid
  MOD_RES (8)..(8): Any amino acid
  MOD_RES (9)..(9): Any amino acid
  MOD_RES (10)..(10): Any amino acid
  MOD_RES (11)..(11): Phe or Tyr
XXXXXXXXXXX

SEQ ID NO: 28 - protein, 11 aa, Artificial Sequence
  Description of Artificial Sequence: Synthetic peptide
  MOD_RES (1)..(1): Any amino acid
  MOD_RES (2)..(2): Ile or Thr
  MOD_RES (3)..(3): Any amino acid
  MOD_RES (4)..(4): Any amino acid
  MOD_RES (5)..(5): Any amino acid
  MOD_RES (6)..(6): Any amino acid
  MOD_RES (7)..(7): Any amino acid
  MOD_RES (8)..(8): Any amino acid
  MOD_RES (9)..(9): Any amino acid
  MOD_RES (10)..(10): Any amino acid
  MOD_RES (11)..(11): Phe or Tyr
XXXXXXXXXXX

SEQ ID NO: 29 - protein, 12 aa, Artificial Sequence
  Description of Artificial Sequence: Synthetic peptide
  MOD_RES (1)..(1): Any amino acid
  MOD_RES (2)..(2): Val, Leu or Phe
  MOD_RES (3)..(3): Any amino acid
  MOD_RES (4)..(4): Any amino acid
  MOD_RES (5)..(5): Any amino acid
  MOD_RES (6)..(6): Any amino acid
  MOD_RES (7)..(7): Any amino acid
  MOD_RES (8)..(8): Any amino acid
  MOD_RES (9)..(9): Any amino acid
  MOD_RES (10)..(10): Any amino acid
  MOD_RES (11)..(11): Any amino acid
  MOD_RES (12)..(12): Phe or Tyr
XXXXXXXXXXXX

SEQ ID NO: 30 - protein, 12 aa, Artificial Sequence
  Description of Artificial Sequence: Synthetic peptide
  MOD_RES (1)..(1): Any amino acid
  MOD_RES (2)..(2): Ile or Thr
  MOD_RES (3)..(3): Any amino acid
  MOD_RES (4)..(4): Any amino acid
  MOD_RES (5)..(5): Any amino acid
  MOD_RES (6)..(6): Any amino acid
  MOD_RES (7)..(7): Any amino acid
  MOD_RES (8)..(8): Any amino acid
  MOD_RES (9)..(9): Any amino acid
  MOD_RES (10)..(10): Any amino acid
  MOD_RES (11)..(11): Any amino acid
  MOD_RES (12)..(12): Phe or Tyr
XXXXXXXXXXXX

SEQ ID NO: 31 - protein, 8 aa, Artificial Sequence
  Description of Artificial Sequence: Synthetic peptide
  MOD_RES (1)..(1): Any amino acid
  MOD_RES (2)..(2): Phe or Tyr
  MOD_RES (3)..(3): Any amino acid
  MOD_RES (4)..(4): Any amino acid
  MOD_RES (5)..(5): Any amino acid
  MOD_RES (6)..(6): Any amino acid
  MOD_RES (7)..(7): Any amino acid
XXXXXXXL

SEQ ID NO: 32 - protein, 9 aa, Artificial Sequence
  Description of Artificial Sequence: Synthetic peptide
  MOD_RES (1)..(1): Any amino acid
  MOD_RES (2)..(2): Phe or Tyr
  MOD_RES (3)..(3): Any amino acid
  MOD_RES (4)..(4): Any amino acid
  MOD_RES (5)..(5): Any amino acid
  MOD_RES (6)..(6): Any amino acid
  MOD_RES (7)..(7): Any amino acid
  MOD_RES (8)..(8): Any amino acid
XXXXXXXXL

SEQ ID NO: 33 - protein, 10 aa, Artificial Sequence
  Description of Artificial Sequence: Synthetic peptide
  MOD_RES (1)..(1): Any amino acid
  MOD_RES (2)..(2): Phe or Tyr
  MOD_RES (3)..(3): Any amino acid
  MOD_RES (4)..(4): Any amino acid
  MOD_RES (5)..(5): Any amino acid
  MOD_RES (6)..(6): Any amino acid
  MOD_RES (7)..(7): Any amino acid
  MOD_RES (8)..(8): Any amino acid
  MOD_RES (9)..(9): Any amino acid
XXXXXXXXXL

SEQ ID NO: 34 - protein, 11 aa, Artificial Sequence
  Description of Artificial Sequence: Synthetic peptide
  MOD_RES (1)..(1): Any amino acid
  MOD_RES (2)..(2): Phe or Tyr
  MOD_RES (3)..(3): Any amino acid
  MOD_RES (4)..(4): Any amino acid
  MOD_RES (5)..(5): Any amino acid
  MOD_RES (6)..(6): Any amino acid
  MOD_RES (7)..(7): Any amino acid
  MOD_RES (8)..(8): Any amino acid
  MOD_RES (9)..(9): Any amino acid
  MOD_RES (10)..(10): Any amino acid
XXXXXXXXXXL

SEQ ID NO: 35 - protein, 12 aa, Artificial Sequence
  Description of Artificial Sequence: Synthetic peptide
  MOD_RES (1)..(1): Any amino acid
  MOD_RES (2)..(2): Phe or Tyr
  MOD_RES (3)..(3): Any amino acid
  MOD_RES (4)..(4): Any amino acid
  MOD_RES (5)..(5): Any amino acid
  MOD_RES (6)..(6): Any amino acid
  MOD_RES (7)..(7): Any amino acid
  MOD_RES (8)..(8): Any amino acid
  MOD_RES (9)..(9): Any amino acid
  MOD_RES (10)..(10): Any amino acid
  MOD_RES (11)..(11): Any amino acid
XXXXXXXXXXXL

SEQ ID NO: 36 - protein, 8 aa, Artificial Sequence
  Description of Artificial Sequence: Synthetic peptide
  MOD_RES (1)..(1): Any amino acid
  MOD_RES (2)..(2): Any amino acid
  MOD_RES (3)..(3): Any amino acid
  MOD_RES (4)..(4): Any amino acid
  MOD_RES (5)..(5): Any amino acid
  MOD_RES (6)..(6): Any amino acid
  MOD_RES (7)..(7): Any amino acid
  MOD_RES (8)..(8): Lys or Arg
XXXXXXXX

SEQ ID NO: 37 - protein, 9 aa, Artificial Sequence
  Description of Artificial Sequence: Synthetic peptide
  MOD_RES (1)..(1): Any amino acid
  MOD_RES (2)..(2): Any amino acid
  MOD_RES (3)..(3): Any amino acid
  MOD_RES (4)..(4): Any amino acid
  MOD_RES (5)..(5): Any amino acid
  MOD_RES (6)..(6): Any amino acid
  MOD_RES (7)..(7): Any amino acid
  MOD_RES (8)..(8): Any amino acid
  MOD_RES (9)..(9): Lys or Arg
XXXXXXXXX

SEQ ID NO: 38 - protein, 10 aa, Artificial Sequence
  Description of Artificial Sequence: Synthetic peptide
  MOD_RES (1)..(1): Any amino acid
  MOD_RES (2)..(2): Any amino acid
  MOD_RES (3)..(3): Any amino acid
  MOD_RES (4)..(4): Any amino acid
  MOD_RES (5)..(5): Any amino acid
  MOD_RES (6)..(6): Any amino acid
  MOD_RES (7)..(7): Any amino acid
  MOD_RES (8)..(8): Any amino acid
  MOD_RES (9)..(9): Any amino acid
  MOD_RES (10)..(10): Lys or Arg
XXXXXXXXXX

SEQ ID NO: 39 - protein, 11 aa, Artificial Sequence
  Description of Artificial Sequence: Synthetic peptide
  MOD_RES (1)..(1): Any amino acid
  MOD_RES (2)..(2): Any amino acid
  MOD_RES (3)..(3): Any amino acid
  MOD_RES (4)..(4): Any amino acid
  MOD_RES (5)..(5): Any amino acid
  MOD_RES (6)..(6): Any amino acid
  MOD_RES (7)..(7): Any amino acid
  MOD_RES (8)..(8): Any amino acid
  MOD_RES (9)..(9): Any amino acid
  MOD_RES (10)..(10): Any amino acid
  MOD_RES (11)..(11): Lys or Arg
XXXXXXXXXXX

SEQ ID NO: 40 - protein, 12 aa, Artificial Sequence
  Description of Artificial Sequence: Synthetic peptide
  MOD_RES (1)..(1): Any amino acid
  MOD_RES (2)..(2): Any amino acid
  MOD_RES (3)..(3): Any amino acid
  MOD_RES (4)..(4): Any amino acid
  MOD_RES (5)..(5): Any amino acid
  MOD_RES (6)..(6): Any amino acid
  MOD_RES (7)..(7): Any amino acid
  MOD_RES (8)..(8): Any amino acid
  MOD_RES (9)..(9): Any amino acid
  MOD_RES (10)..(10): Any amino acid
  MOD_RES (11)..(11): Any amino acid
  MOD_RES (12)..(12): Lys or Arg
XXXXXXXXXXXX

SEQ ID NO: 41 - protein, 8 aa, Artificial Sequence
  Description of Artificial Sequence: Synthetic peptide
  MOD_RES (1)..(1): Any amino acid
  MOD_RES (2)..(2): Any amino acid
  MOD_RES (3)..(3): Any amino acid
  MOD_RES (4)..(4): Any amino acid
  MOD_RES (5)..(5): Any amino acid
  MOD_RES (6)..(6): Any amino acid
  MOD_RES (7)..(7): Any amino acid
  MOD_RES (8)..(8): Lys or Arg
XXXXXXXX

SEQ ID NO: 42 - protein, 9 aa, Artificial Sequence
  Description of Artificial Sequence: Synthetic peptide
  MOD_RES (1)..(1): Any amino acid
  MOD_RES (2)..(2): Any amino acid
  MOD_RES (3)..(3): Any amino acid
  MOD_RES (4)..(4): Any amino acid
  MOD_RES (5)..(5): Any amino acid
  MOD_RES (6)..(6): Any amino acid
  MOD_RES (7)..(7): Any amino acid
  MOD_RES (8)..(8): Any amino acid
  MOD_RES (9)..(9): Lys or Arg
XXXXXXXXX

SEQ ID NO: 43 - protein, 10 aa, Artificial Sequence
  Description of Artificial Sequence: Synthetic peptide
  MOD_RES (1)..(1): Any amino acid
  MOD_RES (2)..(2): Any amino acid
  MOD_RES (3)..(3): Any amino acid
  MOD_RES (4)..(4): Any amino acid
  MOD_RES (5)..(5): Any amino acid
  MOD_RES (6)..(6): Any amino acid
  MOD_RES (7)..(7): Any amino acid
  MOD_RES (8)..(8): Any amino acid
  MOD_RES (9)..(9): Any amino acid
  MOD_RES (10)..(10): Lys or Arg
XXXXXXXXXX

SEQ ID NO: 44 - protein, 11 aa, Artificial Sequence
  Description of Artificial Sequence: Synthetic peptide
  MOD_RES (1)..(1): Any amino acid
  MOD_RES (2)..(2): Any amino acid
  MOD_RES (3)..(3): Any amino acid
  MOD_RES (4)..(4): Any amino acid
  MOD_RES (5)..(5): Any amino acid
  MOD_RES (6)..(6): Any amino acid
  MOD_RES (7)..(7): Any amino acid
  MOD_RES (8)..(8): Any amino acid
  MOD_RES (9)..(9): Any amino acid
  MOD_RES (10)..(10): Any amino acid
  MOD_RES (11)..(11): Lys or Arg
XXXXXXXXXXX

SEQ ID NO: 45 - protein, 12 aa, Artificial Sequence
  Description of Artificial Sequence: Synthetic peptide
  MOD_RES (1)..(1): Any amino acid
  MOD_RES (2)..(2): Any amino acid
  MOD_RES (3)..(3): Any amino acid
  MOD_RES (4)..(4): Any amino acid
  MOD_RES (5)..(5): Any amino acid
  MOD_RES (6)..(6): Any amino acid
  MOD_RES (7)..(7): Any amino acid
  MOD_RES (8)..(8): Any amino acid
  MOD_RES (9)..(9): Any amino acid
  MOD_RES (10)..(10): Any amino acid
  MOD_RES (11)..(11): Any amino acid
  MOD_RES (12)..(12): Lys or Arg
XXXXXXXXXXXX

SEQ ID NO: 46 - protein, 8 aa, Artificial Sequence
  Description of Artificial Sequence: Synthetic peptide
  MOD_RES (1)..(1): Any amino acid
  MOD_RES (3)..(3): Any amino acid
  MOD_RES (4)..(4): Any amino acid
  MOD_RES (5)..(5): Any amino acid
  MOD_RES (6)..(6): Any amino acid
  MOD_RES (7)..(7): Any amino acid
  MOD_RES (8)..(8): Lys or Arg
XVXXXXXX

SEQ ID NO: 47 - protein, 9 aa, Artificial Sequence
  Description of Artificial Sequence: Synthetic peptide
  MOD_RES (1)..(1): Any amino acid
  MOD_RES (3)..(3): Any amino acid
  MOD_RES (4)..(4): Any amino acid
  MOD_RES (5)..(5): Any amino acid
  MOD_RES (6)..(6): Any amino acid
  MOD_RES (7)..(7): Any amino acid
  MOD_RES (8)..(8): Any amino acid
  MOD_RES (9)..(9): Lys or Arg
XVXXXXXXX

SEQ ID NO: 48 - protein, 10 aa, Artificial Sequence
  Description of Artificial Sequence: Synthetic peptide
  MOD_RES (1)..(1): Any amino acid
  MOD_RES (3)..(3): Any amino acid
  MOD_RES (4)..(4): Any amino acid
  MOD_RES (5)..(5): Any amino acid
  MOD_RES (6)..(6): Any amino acid
  MOD_RES (7)..(7): Any amino acid
  MOD_RES (8)..(8): Any amino acid
  MOD_RES (9)..(9): Any amino acid
  MOD_RES (10)..(10): Lys or Arg
XVXXXXXXXX

SEQ ID NO: 49 - protein, 11 aa, Artificial Sequence
  Description of Artificial Sequence: Synthetic peptide
  MOD_RES (1)..(1): Any amino acid
  MOD_RES (3)..(3): Any amino acid
  MOD_RES (4)..(4): Any amino acid
  MOD_RES (5)..(5): Any amino acid
  MOD_RES (6)..(6): Any amino acid
  MOD_RES (7)..(7): Any amino acid
  MOD_RES (8)..(8): Any amino acid
  MOD_RES (9)..(9): Any amino acid
  MOD_RES (10)..(10): Any amino acid
  MOD_RES (11)..(11): Lys or Arg
XVXXXXXXXXX

SEQ ID NO: 50 - protein, 12 aa, Artificial Sequence
  Description of Artificial Sequence: Synthetic peptide
  MOD_RES (1)..(1): Any amino acid
  MOD_RES (3)..(3): Any amino acid
  MOD_RES (4)..(4): Any amino acid
  MOD_RES (5)..(5): Any amino acid
  MOD_RES (6)..(6): Any amino acid
  MOD_RES (7)..(7): Any amino acid
  MOD_RES (8)..(8): Any amino acid
  MOD_RES (9)..(9): Any amino acid
  MOD_RES (10)..(10): Any amino acid
  MOD_RES (11)..(11): Any amino acid
  MOD_RES (12)..(12): Lys or Arg
XVXXXXXXXXXX

SEQ ID NO: 51 - protein, 8 aa, Artificial Sequence
  Description of Artificial Sequence: Synthetic peptide
  MOD_RES (1)..(1): Any amino acid
  MOD_RES (3)..(3): Any amino acid
  MOD_RES (4)..(4): Any amino acid
  MOD_RES (5)..(5): Any amino acid
  MOD_RES (6)..(6): Any amino acid
  MOD_RES (7)..(7): Any amino acid
  MOD_RES (8)..(8): Lys or Arg
XTXXXXXX

SEQ ID NO: 52 - protein, 9 aa, Artificial Sequence
  Description of Artificial Sequence: Synthetic peptide
  MOD_RES (1)..(1): Any amino acid
  MOD_RES (3)..(3): Any amino acid
  MOD_RES (4)..(4): Any amino acid
  MOD_RES (5)..(5): Any amino acid
  MOD_RES (6)..(6): Any amino acid
  MOD_RES (7)..(7): Any amino acid
  MOD_RES (8)..(8): Any amino acid
  MOD_RES (9)..(9): Lys or Arg
XTXXXXXXX

SEQ ID NO: 53 - protein, 10 aa, Artificial Sequence
  Description of Artificial Sequence: Synthetic peptide
  MOD_RES (1)..(1): Any amino acid
  MOD_RES (3)..(3): Any amino acid
  MOD_RES (4)..(4): Any amino acid
  MOD_RES (5)..(5): Any amino acid
  MOD_RES (6)..(6): Any amino acid
  MOD_RES (7)..(7): Any amino acid
  MOD_RES (8)..(8): Any amino acid
  MOD_RES (9)..(9): Any amino acid
  MOD_RES (10)..(10): Lys or Arg
XTXXXXXXXX

SEQ ID NO: 54 - protein, 11 aa, Artificial Sequence
  Description of Artificial Sequence: Synthetic peptide
  MOD_RES (1)..(1): Any amino acid
  MOD_RES (3)..(3): Any amino acid
  MOD_RES (4)..(4): Any amino acid
  MOD_RES (5)..(5): Any amino acid
  MOD_RES (6)..(6): Any amino acid
  MOD_RES (7)..(7): Any amino acid
  MOD_RES (8)..(8): Any amino acid
  MOD_RES (9)..(9): Any amino acid
  MOD_RES (10)..(10): Any amino acid
  MOD_RES (11)..(11): Lys or Arg
XTXXXXXXXXX

SEQ ID NO: 55 - protein, 12 aa, Artificial Sequence
  Description of Artificial Sequence: Synthetic peptide
  MOD_RES (1)..(1): Any amino acid
  MOD_RES (3)..(3): Any amino acid
  MOD_RES (4)..(4): Any amino acid
  MOD_RES (5)..(5): Any amino acid
  MOD_RES (6)..(6): Any amino acid
  MOD_RES (7)..(7): Any amino acid
  MOD_RES (8)..(8): Any amino acid
  MOD_RES (9)..(9): Any amino acid
  MOD_RES (10)..(10): Any amino acid
  MOD_RES (11)..(11): Any amino acid
  MOD_RES (12)..(12): Lys or Arg
XTXXXXXXXXXX

SEQ ID NO: 56 - protein, 8 aa, Artificial Sequence
  Description of Artificial Sequence: Synthetic peptide
  MOD_RES (1)..(1): Any amino acid
  MOD_RES (3)..(3): Any amino acid
  MOD_RES (4)..(4): Any amino acid
  MOD_RES (5)..(5): Any amino acid
  MOD_RES (6)..(6): Any amino acid
  MOD_RES (7)..(7): Any amino acid
XPXXXXXL

SEQ ID NO: 57 - protein, 9 aa, Artificial Sequence
  Description of Artificial Sequence: Synthetic peptide
  MOD_RES (1)..(1): Any amino acid
  MOD_RES (3)..(3): Any amino acid
  MOD_RES (4)..(4): Any amino acid
  MOD_RES (5)..(5): Any amino acid
  MOD_RES (6)..(6): Any amino acid
  MOD_RES (7)..(7): Any amino acid
  MOD_RES (8)..(8): Any amino acid
XPXXXXXXL

SEQ ID NO: 58 - protein, 10 aa, Artificial Sequence
  Description of Artificial Sequence: Synthetic peptide
  MOD_RES (1)..(1): Any amino acid
  MOD_RES (3)..(3): Any amino acid
  MOD_RES (4)..(4): Any amino acid
  MOD_RES (5)..(5): Any amino acid
  MOD_RES (6)..(6): Any amino acid
  MOD_RES (7)..(7): Any amino acid
  MOD_RES (8)..(8): Any amino acid
  MOD_RES (9)..(9): Any amino acid
XPXXXXXXXL

SEQ ID NO: 59 - protein, 11 aa, Artificial Sequence
  Description of Artificial Sequence: Synthetic peptide
  MOD_RES (1)..(1): Any amino acid
  MOD_RES (3)..(3): Any amino acid
  MOD_RES (4)..(4): Any amino acid
  MOD_RES (5)..(5): Any amino acid
  MOD_RES (6)..(6): Any amino acid
  MOD_RES (7)..(7): Any amino acid
  MOD_RES (8)..(8): Any amino acid
  MOD_RES (9)..(9): Any amino acid
  MOD_RES (10)..(10): Any amino acid
XPXXXXXXXXL

SEQ ID NO: 60 - protein, 12 aa, Artificial Sequence
  Description of Artificial Sequence: Synthetic peptide
  MOD_RES (1)..(1): Any amino acid
  MOD_RES (3)..(3): Any amino acid
  MOD_RES (4)..(4): Any amino acid
  MOD_RES (5)..(5): Any amino acid
  MOD_RES (6)..(6): Any amino acid
  MOD_RES (7)..(7): Any amino acid
  MOD_RES (8)..(8): Any amino acid
  MOD_RES (9)..(9): Any amino acid
  MOD_RES (10)..(10): Any amino acid
  MOD_RES (11)..(11): Any amino acid
XPXXXXXXXXXL

SEQ ID NO: 61 - protein, 8 aa, Artificial Sequence
  Description of Artificial Sequence: Synthetic peptide
  MOD_RES (1)..(1): Any amino acid
  MOD_RES (2)..(2): Any amino acid
  MOD_RES (4)..(4): Any amino acid
  MOD_RES (5)..(5): Lys or Arg
  MOD_RES (6)..(6): Any amino acid
  MOD_RES (7)..(7): Any amino acid
XXKXXXXL

SEQ ID NO: 62 - protein, 9 aa, Artificial Sequence
  Description of Artificial Sequence: Synthetic peptide
  MOD_RES (1)..(1): Any amino acid
  MOD_RES (2)..(2): Any amino acid
  MOD_RES (4)..(4): Any amino acid
  MOD_RES (5)..(5): Lys or Arg
  MOD_RES (6)..(6): Any amino acid
  MOD_RES (7)..(7): Any amino acid
  MOD_RES (8)..(8): Any amino acid
XXKXXXXXL

SEQ ID NO: 63 - protein, 10 aa, Artificial Sequence
  Description of Artificial Sequence: Synthetic peptide
  MOD_RES (1)..(1): Any amino acid
  MOD_RES (2)..(2): Any amino acid
  MOD_RES (4)..(4): Any amino acid
  MOD_RES (5)..(5): Lys or Arg
  MOD_RES (6)..(6): Any amino acid
  MOD_RES (7)..(7): Any amino acid
  MOD_RES (8)..(8): Any amino acid
  MOD_RES (9)..(9): Any amino acid
XXKXXXXXXL

SEQ ID NO: 64 - protein, 11 aa, Artificial Sequence
  Description of Artificial Sequence: Synthetic peptide
  MOD_RES (1)..(1): Any amino acid
  MOD_RES (2)..(2): Any amino acid
  MOD_RES (4)..(4): Any amino acid
  MOD_RES (5)..(5): Lys or Arg
  MOD_RES (6)..(6): Any amino acid
  MOD_RES (7)..(7): Any amino acid
  MOD_RES (8)..(8): Any amino acid
  MOD_RES (9)..(9): Any amino acid
  MOD_RES (10)..(10): Any amino acid
XXKXXXXXXXL

SEQ ID NO: 65 - protein, 12 aa, Artificial Sequence
  Description of Artificial Sequence: Synthetic peptide
  MOD_RES (1)..(1): Any amino acid
  MOD_RES (2)..(2): Any amino acid
  MOD_RES (4)..(4): Any amino acid
  MOD_RES (5)..(5): Lys or Arg
  MOD_RES (6)..(6): Any amino acid
  MOD_RES (7)..(7): Any amino acid
  MOD_RES (8)..(8): Any amino acid
  MOD_RES (9)..(9): Any amino acid
  MOD_RES (10)..(10): Any amino acid
  MOD_RES (11)..(11): Any amino acid
XXKXXXXXXXXL

SEQ ID NO: 66 - protein, 8 aa, Artificial Sequence
  Description of Artificial Sequence: Synthetic peptide
  MOD_RES (1)..(1): Any amino acid
  MOD_RES (2)..(2): Gln or Leu
  MOD_RES (3)..(3): Any amino acid
  MOD_RES (4)..(4): Any amino acid
  MOD_RES (5)..(5): Any amino acid
  MOD_RES (6)..(6): Any amino acid
  MOD_RES (7)..(7): Any amino acid
  MOD_RES (8)..(8): Phe or Tyr
XXXXXXXX

SEQ ID NO: 67 - protein, 9 aa, Artificial Sequence
  Description of Artificial Sequence: Synthetic peptide
  MOD_RES (1)..(1): Any amino acid
  MOD_RES (2)..(2): Gln or Leu
  MOD_RES (3)..(3): Any amino acid
  MOD_RES (4)..(4): Any amino acid
  MOD_RES (5)..(5): Any amino acid
  MOD_RES (6)..(6): Any amino acid
  MOD_RES (7)..(7): Any amino acid
  MOD_RES (8)..(8): Any amino acid
  MOD_RES (9)..(9): Phe or Tyr
XXXXXXXXX

SEQ ID NO: 68 - protein, 10 aa, Artificial Sequence
  Description of Artificial Sequence: Synthetic peptide
  MOD_RES (1)..(1): Any amino acid
  MOD_RES (2)..(2): Gln or Leu
  MOD_RES (3)..(3): Any amino acid
  MOD_RES (4)..(4): Any amino acid
  MOD_RES (5)..(5): Any amino acid
  MOD_RES (6)..(6): Any amino acid
  MOD_RES (7)..(7): Any amino acid
  MOD_RES (8)..(8): Any amino acid
  MOD_RES (9)..(9): Any amino acid
  MOD_RES (10)..(10): Phe or Tyr
XXXXXXXXXX

SEQ ID NO: 69 - protein, 11 aa, Artificial Sequence
  Description of Artificial Sequence: Synthetic peptide
  MOD_RES (1)..(1): Any amino acid
  MOD_RES (2)..(2): Gln or Leu
  MOD_RES (3)..(3): Any amino acid
  MOD_RES (4)..(4): Any amino acid
  MOD_RES (5)..(5): Any amino acid
  MOD_RES (6)..(6): Any amino acid
  MOD_RES (7)..(7): Any amino acid
  MOD_RES (8)..(8): Any amino acid
  MOD_RES (9)..(9): Any amino acid
  MOD_RES (10)..(10): Any amino acid
  MOD_RES (11)..(11): Phe or Tyr
XXXXXXXXXXX

SEQ ID NO: 70 - protein, 12 aa, Artificial Sequence
  Description of Artificial Sequence: Synthetic peptide
  MOD_RES (1)..(1): Any amino acid
  MOD_RES (2)..(2): Gln or Leu
  MOD_RES (3)..(3): Any amino acid
  MOD_RES (4)..(4): Any amino acid
  MOD_RES (5)..(5): Any amino acid
  MOD_RES (6)..(6): Any amino acid
  MOD_RES (7)..(7): Any amino acid
  MOD_RES (8)..(8): Any amino acid
  MOD_RES (9)..(9): Any amino acid
  MOD_RES (10)..(10): Any amino acid
  MOD_RES (11)..(11): Any amino acid
  MOD_RES (12)..(12): Phe or Tyr
XXXXXXXXXXXX

SEQ ID NO: 71 - protein, 8 aa, Artificial Sequence
  Description of Artificial Sequence: Synthetic peptide
  MOD_RES (1)..(1): Any amino acid
  MOD_RES (3)..(3): Any amino acid
  MOD_RES (4)..(4): Any amino acid
  MOD_RES (5)..(5): Any amino acid
  MOD_RES (6)..(6): Any amino acid
  MOD_RES (7)..(7): Any amino acid
  MOD_RES (8)..(8): Phe or Tyr
XRXXXXXX

SEQ ID NO: 72 - protein, 9 aa, Artificial Sequence
  Description of Artificial Sequence: Synthetic peptide
  MOD_RES (1)..(1): Any amino acid
  MOD_RES (3)..(3): Any amino acid
  MOD_RES (4)..(4): Any amino acid
  MOD_RES (5)..(5): Any amino acid
  MOD_RES (6)..(6): Any amino acid
  MOD_RES (7)..(7): Any amino acid
  MOD_RES (8)..(8): Any amino acid
  MOD_RES (9)..(9): Phe or Tyr
XRXXXXXXX

SEQ ID NO: 73 - protein, 10 aa, Artificial Sequence
  Description of Artificial Sequence: Synthetic peptide
  MOD_RES (1)..(1): Any amino acid
  MOD_RES (3)..(3): Any amino acid
  MOD_RES (4)..(4): Any amino acid
  MOD_RES (5)..(5): Any amino acid
  MOD_RES (6)..(6): Any amino acid
  MOD_RES (7)..(7): Any amino acid
  MOD_RES (8)..(8): Any amino acid
  MOD_RES (9)..(9): Any amino acid
  MOD_RES (10)..(10): Phe or Tyr
XRXXXXXXXX

SEQ ID NO: 74 - protein, 11 aa, Artificial Sequence
  Description of Artificial Sequence: Synthetic peptide
  MOD_RES (1)..(1): Any amino acid
  MOD_RES (3)..(3): Any amino acid
  MOD_RES (4)..(4): Any amino acid
  MOD_RES (5)..(5): Any amino acid
  MOD_RES (6)..(6): Any amino acid
  MOD_RES (7)..(7): Any amino acid
  MOD_RES (8)..(8): Any amino acid
  MOD_RES (9)..(9): Any amino acid
  MOD_RES (10)..(10): Any amino acid
  MOD_RES (11)..(11): Phe or Tyr
XRXXXXXXXXX

SEQ ID NO: 75 - protein, 12 aa, Artificial Sequence
  Description of Artificial Sequence: Synthetic peptide
  MOD_RES (1)..(1): Any amino acid
  MOD_RES (3)..(3): Any amino acid
  MOD_RES (4)..(4): Any amino acid
  MOD_RES (5)..(5): Any amino acid
  MOD_RES (6)..(6): Any amino acid
  MOD_RES (7)..(7): Any amino acid
  MOD_RES (8)..(8): Any amino acid
  MOD_RES (9)..(9): Any amino acid
  MOD_RES (10)..(10): Any amino acid
  MOD_RES (11)..(11): Any amino acid
  MOD_RES (12)..(12): Phe or Tyr
XRXXXXXXXXXX

SEQ ID NO: 76 - protein, 8 aa, Artificial Sequence
  Description of Artificial Sequence: Synthetic peptide
  MOD_RES (1)..(1): Any amino acid
  MOD_RES (3)..(3): Any amino acid
  MOD_RES (4)..(4): Any amino acid
  MOD_RES (5)..(5): Any amino acid
  MOD_RES (6)..(6): Any amino acid
  MOD_RES (7)..(7): Any amino acid
  MOD_RES (8)..(8): Phe or Tyr
XPXXXXXX

SEQ ID NO: 77 - protein, 9 aa, Artificial Sequence
  Description of Artificial Sequence: Synthetic peptide
  MOD_RES (1)..(1): Any amino acid
  MOD_RES (3)..(3): Any amino acid
  MOD_RES (4)..(4): Any amino acid
  MOD_RES (5)..(5): Any amino acid
  MOD_RES (6)..(6): Any amino acid
  MOD_RES (7)..(7): Any amino acid
  MOD_RES (8)..(8): Any amino acid
  MOD_RES (9)..(9): Phe or Tyr
XPXXXXXXX

SEQ ID NO: 78 - protein, 10 aa, Artificial Sequence
  Description of Artificial Sequence: Synthetic peptide
  MOD_RES (1)..(1): Any amino acid
  MOD_RES (3)..(3): Any amino acid
  MOD_RES (4)..(4): Any amino acid
  MOD_RES (5)..(5): Any amino acid
  MOD_RES (6)..(6): Any amino acid
  MOD_RES (7)..(7): Any amino acid
  MOD_RES (8)..(8): Any amino acid
  MOD_RES (9)..(9): Any amino acid
  MOD_RES (10)..(10): Phe or Tyr
XPXXXXXXXX

SEQ ID NO: 79 - protein, 11 aa, Artificial Sequence
  Description of Artificial Sequence: Synthetic peptide
  MOD_RES (1)..(1): Any amino acid
  MOD_RES (3)..(3): Any amino acid
  MOD_RES (4)..(4): Any amino acid
  MOD_RES (5)..(5): Any amino acid
  MOD_RES (6)..(6): Any amino acid
  MOD_RES (7)..(7): Any amino acid
  MOD_RES (8)..(8): Any amino acid
  MOD_RES (9)..(9): Any amino acid
  MOD_RES (10)..(10): Any amino acid
  MOD_RES (11)..(11): Phe or Tyr
XPXXXXXXXXX

SEQ ID NO: 80 - protein, 12 aa, Artificial Sequence
  Description of Artificial Sequence: Synthetic peptide
  MOD_RES (1)..(1): Any amino acid
  MOD_RES (3)..(3): Any amino acid
  MOD_RES (4)..(4): Any amino acid
  MOD_RES (5)..(5): Any amino acid
  MOD_RES (6)..(6): Any amino acid
  MOD_RES (7)..(7): Any amino acid
  MOD_RES (8)..(8): Any amino acid
  MOD_RES (9)..(9): Any amino acid
  MOD_RES (10)..(10): Any amino acid
  MOD_RES (11)..(11): Any amino acid
  MOD_RES (12)..(12): Phe or Tyr
XPXXXXXXXXXX

SEQ ID NO: 81 - protein, 8 aa, Artificial Sequence
  Description of Artificial Sequence: Synthetic peptide
  MOD_RES (1)..(1): Any amino acid
  MOD_RES (3)..(3): Any amino acid
  MOD_RES (4)..(4): Any amino acid
  MOD_RES (5)..(5): Any amino acid
  MOD_RES (6)..(6): Any amino acid
  MOD_RES (7)..(7): Any amino acid
  MOD_RES (8)..(8): Met, Leu or Ile
XPXXXXXX

SEQ ID NO: 82 - protein, 9 aa, Artificial Sequence
  Description of Artificial Sequence: Synthetic peptide
  MOD_RES (1)..(1): Any amino acid
  MOD_RES (3)..(3): Any amino acid
  MOD_RES (4)..(4): Any amino acid
  MOD_RES (5)..(5): Any amino acid
  MOD_RES (6)..(6): Any amino acid
  MOD_RES (7)..(7): Any amino acid
  MOD_RES (8)..(8): Any amino acid
  MOD_RES (9)..(9): Met, Leu or Ile
XPXXXXXXX

SEQ ID NO: 83 - protein, 10 aa, Artificial Sequence
  Description of Artificial Sequence: Synthetic peptide
  MOD_RES (1)..(1): Any amino acid
  MOD_RES (3)..(3): Any amino acid
  MOD_RES (4)..(4): Any amino acid
  MOD_RES (5)..(5): Any amino acid
  MOD_RES (6)..(6): Any amino acid
  MOD_RES (7)..(7): Any amino acid
  MOD_RES (8)..(8): Any amino acid
  MOD_RES (9)..(9): Any amino acid
  MOD_RES (10)..(10): Met, Leu or Ile
XPXXXXXXXX

SEQ ID NO: 84 - protein, 11 aa, Artificial Sequence
  Description of Artificial Sequence: Synthetic peptide
  MOD_RES (1)..(1): Any amino acid
  MOD_RES (3)..(3): Any amino acid
  MOD_RES (4)..(4): Any amino acid
  MOD_RES (5)..(5): Any amino acid
  MOD_RES (6)..(6): Any amino acid
  MOD_RES (7)..(7): Any amino acid
  MOD_RES (8)..(8): Any amino acid
  MOD_RES (9)..(9): Any amino acid
  MOD_RES (10)..(10): Any amino acid
  MOD_RES (11)..(11): Met, Leu or Ile
XPXXXXXXXXX

SEQ ID NO: 85 - protein, 12 aa, Artificial Sequence
  Description of Artificial Sequence: Synthetic peptide
  MOD_RES (1)..(1): Any amino acid
  MOD_RES (3)..(3): Any amino acid
  MOD_RES (4)..(4): Any amino acid
  MOD_RES (5)..(5): Any amino acid
  MOD_RES (6)..(6): Any amino acid
  MOD_RES (7)..(7): Any amino acid
  MOD_RES (8)..(8): Any amino acid
  MOD_RES (9)..(9): Any amino acid
  MOD_RES (10)..(10): Any amino acid
  MOD_RES (11)..(11): Any amino acid
  MOD_RES (12)..(12): Met, Leu or Ile
XPXXXXXXXXXX

SEQ ID NO: 86 - protein, 8 aa, Artificial Sequence
  Description of Artificial Sequence: Synthetic peptide
  MOD_RES (1)..(1): Any amino acid
  MOD_RES (3)..(3): Any amino acid
  MOD_RES (4)..(4): Any amino acid
  MOD_RES (5)..(5): Any amino acid
  MOD_RES (6)..(6): Any amino acid
  MOD_RES (7)..(7): Any amino acid
XEXXXXXL

SEQ ID NO: 87 - protein, 9 aa, Artificial Sequence
  Description of Artificial Sequence: Synthetic peptide
  MOD_RES (1)..(1): Any amino acid
  MOD_RES (3)..(3): Any amino acid
  MOD_RES (4)..(4): Any amino acid
  MOD_RES (5)..(5): Any amino acid
  MOD_RES (6)..(6): Any amino acid
  MOD_RES (7)..(7): Any amino acid
  MOD_RES (8)..(8): Any amino acid
XEXXXXXXL

SEQ ID NO: 88 - protein, 10 aa, Artificial Sequence
  Description of Artificial Sequence: Synthetic peptide
  MOD_RES (1)..(1): Any amino acid
  MOD_RES (3)..(3): Any amino acid
  MOD_RES (4)..(4): Any amino acid
  MOD_RES (5)..(5): Any amino acid
  MOD_RES (6)..(6): Any amino acid
  MOD_RES (7)..(7): Any amino acid
  MOD_RES (8)..(8): Any amino acid
  MOD_RES (9)..(9): Any amino acid
XEXXXXXXXL

SEQ ID NO: 89 - protein, 11 aa, Artificial Sequence
  Description of Artificial Sequence: Synthetic peptide
  MOD_RES (1)..(1): Any amino acid
  MOD_RES (3)..(3): Any amino acid
  MOD_RES (4)..(4): Any amino acid
  MOD_RES (5)..(5): Any amino acid
  MOD_RES (6)..(6): Any amino acid
  MOD_RES (7)..(7): Any amino acid
  MOD_RES (8)..(8): Any amino acid
  MOD_RES (9)..(9): Any amino acid
  MOD_RES (10)..(10): Any amino acid
XEXXXXXXXXL

SEQ ID NO: 90 - protein, 12 aa, Artificial Sequence
  Description of Artificial Sequence: Synthetic peptide
  MOD_RES (1)..(1): Any amino acid
  MOD_RES (3)..(3): Any amino acid
  MOD_RES (4)..(4): Any amino acid
  MOD_RES (5)..(5): Any amino acid
  MOD_RES (6)..(6): Any amino acid
  MOD_RES (7)..(7): Any amino acid
  MOD_RES (8)..(8): Any amino acid
  MOD_RES (9)..(9): Any amino acid
  MOD_RES (10)..(10): Any amino acid
  MOD_RES (11)..(11): Any amino acid
XEXXXXXXXXXL

SEQ ID NO: 91 - protein, 8 aa, Artificial Sequence
  Description of Artificial Sequence: Synthetic peptide
  MOD_RES (1)..(1): Any amino acid
  MOD_RES (2)..(2): Ala or Gly
  MOD_RES (3)..(3): Any amino acid
  MOD_RES (4)..(4): Any amino acid
  MOD_RES (5)..(5): Any amino acid
  MOD_RES (6)..(6): Any amino acid
  MOD_RES (7)..(7): Any amino acid
  MOD_RES (8)..(8): Val or Ile
XXXXXXXX

SEQ ID NO: 92 - protein, 9 aa, Artificial Sequence
  Description of Artificial Sequence: Synthetic peptide
  MOD_RES (1)..(1): Any amino acid
  MOD_RES (2)..(2): Ala or Gly
  MOD_RES (3)..(3): Any amino acid
  MOD_RES (4)..(4): Any amino acid
  MOD_RES (5)..(5): Any amino acid
  MOD_RES (6)..(6): Any amino acid
  MOD_RES (7)..(7): Any amino acid
  MOD_RES (8)..(8): Any amino acid
  MOD_RES (9)..(9): Val or Ile
XXXXXXXXX

SEQ ID NO: 93 - protein, 10 aa, Artificial Sequence
  Description of Artificial Sequence: Synthetic peptide
  MOD_RES (1)..(1): Any amino acid
  MOD_RES (2)..(2): Ala or Gly
  MOD_RES (3)..(3): Any amino acid
  MOD_RES (4)..(4): Any amino acid
  MOD_RES (5)..(5): Any amino acid
  MOD_RES (6)..(6): Any amino acid
  MOD_RES (7)..(7): Any amino acid
  MOD_RES (8)..(8): Any amino acid
  MOD_RES (9)..(9): Any amino acid
  MOD_RES (10)..(10): Val or Ile
XXXXXXXXXX

SEQ ID NO: 94 - protein, 11 aa, Artificial Sequence
  Description of Artificial Sequence: Synthetic peptide
  MOD_RES (1)..(1): Any amino acid
  MOD_RES (2)..(2): Ala or Gly
  MOD_RES (3)..(3): Any amino acid
  MOD_RES (4)..(4): Any amino acid
  MOD_RES (5)..(5): Any amino acid
  MOD_RES (6)..(6): Any amino acid
  MOD_RES (7)..(7): Any amino acid
  MOD_RES (8)..(8): Any amino acid
  MOD_RES (9)..(9): Any amino acid
  MOD_RES (10)..(10): Any amino acid
  MOD_RES (11)..(11): Val or Ile
XXXXXXXXXXX

SEQ ID NO: 95 - protein, 12 aa, Artificial Sequence
  Description of Artificial Sequence: Synthetic peptide
  MOD_RES (1)..(1): Any amino acid
  MOD_RES (2)..(2): Ala or Gly
  MOD_RES (3)..(3): Any amino acid
  MOD_RES (4)..(4): Any amino acid
  MOD_RES (5)..(5): Any amino acid
  MOD_RES (6)..(6): Any amino acid
  MOD_RES (7)..(7): Any amino acid
  MOD_RES (8)..(8): Any amino acid
  MOD_RES (9)..(9): Any amino acid
  MOD_RES (10)..(10): Any amino acid
  MOD_RES (11)..(11): Any amino acid
  MOD_RES (12)..(12): Val or Ile
XXXXXXXXXXXX

SEQ ID NO: 96 - protein, 8 aa, Artificial Sequence
  Description of Artificial Sequence: Synthetic peptide
  MOD_RES (1)..(1): Any amino acid
  MOD_RES (3)..(3): Any amino acid
  MOD_RES (4)..(4): Any amino acid
  MOD_RES (5)..(5): Any amino acid
  MOD_RES (6)..(6): Any amino acid
  MOD_RES (7)..(7): Any amino acid
  MOD_RES (8)..(8): Val or Ile
XPXXXXXX

SEQ ID NO: 97 - protein, 9 aa, Artificial Sequence
  Description of Artificial Sequence: Synthetic peptide
  MOD_RES (1)..(1): Any amino acid
  MOD_RES (3)..(3): Any amino acid
  MOD_RES (4)..(4): Any amino acid
  MOD_RES (5)..(5): Any amino acid
  MOD_RES (6)..(6): Any amino acid
  MOD_RES (7)..(7): Any amino acid
  MOD_RES (8)..(8): Any amino acid
  MOD_RES (9)..(9): Val or Ile
XPXXXXXXX

SEQ ID NO: 98 - protein, 10 aa, Artificial Sequence
  Description of Artificial Sequence: Synthetic peptide
  MOD_RES (1)..(1): Any amino acid
  MOD_RES (3)..(3): Any amino acid
  MOD_RES (4)..(4): Any amino acid
  MOD_RES (5)..(5): Any amino acid
  MOD_RES (6)..(6): Any amino acid
  MOD_RES (7)..(7): Any amino acid
  MOD_RES (8)..(8): Any amino acid
  MOD_RES (9)..(9): Any amino acid
  MOD_RES (10)..(10): Val or Ile
XPXXXXXXXX

SEQ ID NO: 99 - protein, 11 aa, Artificial Sequence
  Description of Artificial Sequence: Synthetic peptide
  MOD_RES (1)..(1): Any amino acid
  MOD_RES (3)..(3): Any amino acid
  MOD_RES (4)..(4): Any amino acid
  MOD_RES (5)..(5): Any amino acid
  MOD_RES (6)..(6): Any amino acid
  MOD_RES (7)..(7): Any amino acid
  MOD_RES (8)..(8): Any amino acid
  MOD_RES (9)..(9): Any amino acid
  MOD_RES (10)..(10): Any amino acid
  MOD_RES (11)..(11): Val or Ile
XPXXXXXXXXX

SEQ ID NO: 100 - protein, 12 aa, Artificial Sequence
  Description of Artificial Sequence: Synthetic peptide
  MOD_RES (1)..(1): Any amino acid
  MOD_RES (3)..(3): Any amino acid
  MOD_RES (4)..(4): Any amino acid
  MOD_RES (5)..(5): Any amino acid
  MOD_RES (6)..(6): Any amino acid
  MOD_RES (7)..(7): Any amino acid
  MOD_RES (8)..(8): Any amino acid
  MOD_RES (9)..(9): Any amino acid
  MOD_RES (10)..(10): Any amino acid
  MOD_RES (11)..(11): Any amino acid
  MOD_RES (12)..(12): Val or Ile
XPXXXXXXXXXX

SEQ ID NO: 101 - protein, 8 aa, Artificial Sequence
  Description of Artificial Sequence: Synthetic peptide
  MOD_RES (1)..(1): Any amino acid
  MOD_RES (3)..(3): Any amino acid
  MOD_RES (4)..(4): Any amino acid
  MOD_RES (5)..(5): Any amino acid
  MOD_RES (6)..(6): Any amino acid
  MOD_RES (7)..(7): Any amino acid
  MOD_RES (8)..(8): Phe or Tyr
XEXXXXXX

SEQ ID NO: 102 - protein, 9 aa, Artificial Sequence
  Description of Artificial Sequence: Synthetic peptide
  MOD_RES (1)..(1): Any amino acid
  MOD_RES (3)..(3): Any amino acid
  MOD_RES (4)..(4): Any amino acid
  MOD_RES (5)..(5): Any amino acid
  MOD_RES (6)..(6): Any amino acid
  MOD_RES (7)..(7): Any amino acid
  MOD_RES (8)..(8): Any amino acid
  MOD_RES (9)..(9): Phe or Tyr
XEXXXXXXX

SEQ ID NO: 103 - protein, 10 aa, Artificial Sequence
  Description of Artificial Sequence: Synthetic peptide
  MOD_RES (1)..(1): Any amino acid
  MOD_RES (3)..(3): Any amino acid
  MOD_RES (4)..(4): Any amino acid
  MOD_RES (5)..(5): Any amino acid
  MOD_RES (6)..(6): Any amino acid
  MOD_RES (7)..(7): Any amino acid
  MOD_RES (8)..(8): Any amino acid
  MOD_RES (9)..(9): Any amino acid
  MOD_RES (10)..(10): Phe or Tyr
XEXXXXXXXX

SEQ ID NO: 104 - protein, 11 aa, Artificial Sequence
  Description of Artificial Sequence: Synthetic peptide
  MOD_RES (1)..(1): Any amino acid
  MOD_RES (3)..(3): Any amino acid
  MOD_RES (4)..(4): Any amino acid
  MOD_RES (5)..(5): Any amino acid
  MOD_RES (6)..(6): Any amino acid
  MOD_RES (7)..(7): Any amino acid
  MOD_RES (8)..(8): Any amino acid
  MOD_RES (9)..(9): Any amino acid
  MOD_RES (10)..(10): Any amino acid
  MOD_RES (11)..(11): Phe or Tyr
XEXXXXXXXXX

SEQ ID NO: 105 - protein, 12 aa, Artificial Sequence
  Description of Artificial Sequence: Synthetic peptide
  MOD_RES (1)..(1): Any amino acid
  MOD_RES (3)..(3): Any amino acid
  MOD_RES (4)..(4): Any amino acid
  MOD_RES (5)..(5): Any amino acid
  MOD_RES (6)..(6): Any amino acid
  MOD_RES (7)..(7): Any amino acid
  MOD_RES (8)..(8): Any amino acid
  MOD_RES (9)..(9): Any amino acid
  MOD_RES (10)..(10): Any amino acid
  MOD_RES (11)..(11): Any amino acid
  MOD_RES (12)..(12): Phe or Tyr
XEXXXXXXXXXX

SEQ ID NO: 106 - protein, 8 aa, Artificial Sequence
  Description of Artificial Sequence: Synthetic peptide
  MOD_RES (1)..(1): Any amino acid
  MOD_RES (3)..(3): Any amino acid
  MOD_RES (4)..(4): Any amino acid
  MOD_RES (5)..(5): Any amino acid
  MOD_RES (6)..(6): Any amino acid
  MOD_RES (7)..(7): Any amino acid
XPXXXXXW

SEQ ID NO: 107 - protein, 9 aa, Artificial Sequence
  Description of Artificial Sequence: Synthetic peptide
  MOD_RES (1)..(1): Any amino acid
  MOD_RES (3)..(3): Any amino acid
  MOD_RES (4)..(4): Any amino acid
  MOD_RES (5)..(5): Any amino acid
  MOD_RES (6)..(6): Any amino acid
  MOD_RES (7)..(7): Any amino acid
  MOD_RES (8)..(8): Any amino acid
XPXXXXXXW

SEQ ID NO: 108 - protein, 10 aa, Artificial Sequence
  Description of Artificial Sequence: Synthetic peptide
  MOD_RES (1)..(1): Any amino acid
  MOD_RES (3)..(3): Any amino acid
  MOD_RES (4)..(4): Any amino acid
  MOD_RES (5)..(5): Any amino acid
  MOD_RES (6)..(6): Any amino acid
  MOD_RES (7)..(7): Any amino acid
  MOD_RES (8)..(8): Any amino acid
  MOD_RES (9)..(9): Any amino acid
XPXXXXXXXW

SEQ ID NO: 109 - protein, 11 aa, Artificial Sequence
  Description of Artificial Sequence: Synthetic peptide
  MOD_RES (1)..(1): Any amino acid
  MOD_RES (3)..(3): Any amino acid
  MOD_RES (4)..(4): Any amino acid
  MOD_RES (5)..(5): Any amino acid
  MOD_RES (6)..(6): Any amino acid
  MOD_RES (7)..(7): Any amino acid
  MOD_RES (8)..(8): Any amino acid
  MOD_RES (9)..(9): Any amino acid
  MOD_RES (10)..(10): Any amino acid
XPXXXXXXXXW

SEQ ID NO: 110 - protein, 12 aa, Artificial Sequence
  Description of Artificial Sequence: Synthetic peptide
  MOD_RES (1)..(1): Any amino acid
  MOD_RES (3)..(3): Any amino acid
  MOD_RES (4)..(4): Any amino acid
  MOD_RES (5)..(5): Any amino acid
  MOD_RES (6)..(6): Any amino acid
  MOD_RES (7)..(7): Any amino acid
  MOD_RES (8)..(8): Any amino acid
  MOD_RES (9)..(9): Any amino acid
  MOD_RES (10)..(10): Any amino acid
  MOD_RES (11)..(11): Any amino acid
XPXXXXXXXXXW

SEQ ID NO: 111 - protein, 8 aa, Artificial Sequence
  Description of Artificial Sequence: Synthetic peptide
  MOD_RES (1)..(1): Any amino acid
  MOD_RES (3)..(3): Any amino acid
  MOD_RES (4)..(4): Any amino acid
  MOD_RES (5)..(5): Any amino acid
  MOD_RES (6)..(6): Any amino acid
  MOD_RES (7)..(7): Any amino acid
  MOD_RES (8)..(8): Phe or Leu
XPXXXXXX

SEQ ID NO: 112 - protein, 9 aa, Artificial Sequence
  Description of Artificial Sequence: Synthetic peptide
  MOD_RES (1)..(1): Any amino acid
  MOD_RES (3)..(3): Any amino acid
  MOD_RES (4)..(4): Any amino acid
  MOD_RES (5)..(5): Any amino acid
  MOD_RES (6)..(6): Any amino acid
  MOD_RES (7)..(7): Any amino acid
  MOD_RES (8)..(8): Any amino acid
  MOD_RES (9)..(9): Phe or Leu
XPXXXXXXX

SEQ ID NO: 113 - protein, 10 aa, Artificial Sequence
  Description of Artificial Sequence: Synthetic peptide
  MOD_RES (1)..(1): Any amino acid
  MOD_RES (3)..(3): Any amino acid
  MOD_RES (4)..(4): Any amino acid
  MOD_RES (5)..(5): Any amino acid
  MOD_RES (6)..(6): Any amino acid
  MOD_RES (7)..(7): Any amino acid
  MOD_RES (8)..(8): Any amino acid
  MOD_RES (9)..(9): Any amino acid
  MOD_RES (10)..(10): Phe or Leu
XPXXXXXXXX

SEQ ID NO: 114 - protein, 11 aa, Artificial Sequence
  Description of Artificial Sequence: Synthetic peptide
  MOD_RES (1)..(1): Any amino acid
  MOD_RES (3)..(3): Any amino acid
  MOD_RES (4)..(4): Any amino acid
  MOD_RES (5)..(5): Any amino acid
  MOD_RES (6)..(6): Any amino acid
  MOD_RES (7)..(7): Any amino acid
  MOD_RES (8)..(8): Any amino acid
  MOD_RES (9)..(9): Any amino acid
  MOD_RES (10)..(10): Any amino acid
  MOD_RES (11)..(11): Phe or Leu
XPXXXXXXXXX

SEQ ID NO: 115 - protein, 12 aa, Artificial Sequence
  Description of Artificial Sequence: Synthetic peptide
  MOD_RES (1)..(1): Any amino acid
  MOD_RES (3)..(3): Any amino acid
  MOD_RES (4)..(4): Any amino acid
  MOD_RES (5)..(5): Any amino acid
  MOD_RES (6)..(6): Any amino acid
  MOD_RES (7)..(7): Any amino acid
  MOD_RES (8)..(8): Any amino acid
  MOD_RES (9)..(9): Any amino acid
  MOD_RES (10)..(10): Any amino acid
  MOD_RES (11)..(11): Any amino acid
  MOD_RES (12)..(12): Phe or Leu
XPXXXXXXXXXX

SEQ ID NO: 116 - protein, 8 aa, Artificial Sequence
  Description of Artificial Sequence: Synthetic peptide
  MOD_RES (1)..(1): Any amino acid
  MOD_RES (2)..(2): Ala, Thr or Ser
  MOD_RES (3)..(3): Any amino acid
  MOD_RES (4)..(4): Any amino acid
  MOD_RES (5)..(5): Any amino acid
  MOD_RES (6)..(6): Any amino acid
  MOD_RES (7)..(7): Any amino acid
  MOD_RES (8)..(8): Phe or Tyr
XXXXXXXX

SEQ ID NO: 117 - protein, 9 aa, Artificial Sequence
  Description of Artificial Sequence: Synthetic peptide
  MOD_RES (1)..(1): Any amino acid
  MOD_RES (2)..(2): Ala, Thr or Ser
  MOD_RES (3)..(3): Any amino acid
  MOD_RES (4)..(4): Any amino acid
  MOD_RES (5)..(5): Any amino acid
  MOD_RES (6)..(6): Any amino acid
  MOD_RES (7)..(7): Any amino acid
  MOD_RES (8)..(8): Any amino acid
  MOD_RES (9)..(9): Phe or Tyr
XXXXXXXXX

SEQ ID NO: 118 - protein, 10 aa, Artificial Sequence
  Description of Artificial Sequence: Synthetic peptide
  MOD_RES (1)..(1): Any amino acid
  MOD_RES (2)..(2): Ala, Thr or Ser
  MOD_RES (3)..(3): Any amino acid
  MOD_RES (4)..(4): Any amino acid
  MOD_RES (5)..(5): Any amino acid
  MOD_RES (6)..(6): Any amino acid
  MOD_RES (7)..(7): Any amino acid
  MOD_RES (8)..(8): Any amino acid
  MOD_RES (9)..(9): Any amino acid
  MOD_RES (10)..(10): Phe or Tyr
XXXXXXXXXX

SEQ ID NO: 119 - protein, 11 aa, Artificial Sequence
  Description of Artificial Sequence: Synthetic peptide
  MOD_RES (1)..(1): Any amino acid
  MOD_RES (2)..(2): Ala, Thr or Ser
  MOD_RES (3)..(3): Any amino acid
  MOD_RES (4)..(4): Any amino acid
  MOD_RES (5)..(5): Any amino acid
  MOD_RES (6)..(6): Any amino acid
  MOD_RES (7)..(7): Any amino acid
  MOD_RES (8)..(8): Any amino acid
  MOD_RES (9)..(9): Any amino acid
  MOD_RES (10)..(10): Any amino acid
  MOD_RES (11)..(11): Phe or Tyr
XXXXXXXXXXX

SEQ ID NO: 120 - protein, 12 aa, Artificial Sequence
  Description of Artificial Sequence: Synthetic peptide
  MOD_RES (1)..(1): Any amino acid
  MOD_RES (2)..(2): Ala, Thr or Ser
  MOD_RES (3)..(3): Any amino acid
  MOD_RES (4)..(4): Any amino acid
  MOD_RES (5)..(5): Any amino acid
  MOD_RES (6)..(6): Any amino acid
  MOD_RES (7)..(7): Any amino acid
  MOD_RES (8)..(8): Any amino acid
  MOD_RES (9)..(9): Any amino acid
  MOD_RES (10)..(10): Any amino acid
  MOD_RES (11)..(11): Any amino acid
  MOD_RES (12)..(12): Phe or Tyr
XXXXXXXXXXXX

SEQ ID NO: 121 - protein, 8 aa, Artificial Sequence
  Description of Artificial Sequence: Synthetic peptide
  MOD_RES (1)..(1): Any amino acid
  MOD_RES (2)..(2): Ala, Thr or Ser
  MOD_RES (3)..(3): Any amino acid
  MOD_RES (4)..(4): Any amino acid
  MOD_RES (5)..(5): Any amino acid
  MOD_RES (6)..(6): Any amino acid
  MOD_RES (7)..(7): Any amino acid
XXXXXXXW

SEQ ID NO: 122 - protein, 9 aa, Artificial Sequence
  Description of Artificial Sequence: Synthetic peptide
  MOD_RES (1)..(1): Any amino acid
  MOD_RES (2)..(2): Ala, Thr or Ser
  MOD_RES (3)..(3): Any amino acid
  MOD_RES (4)..(4): Any amino acid
  MOD_RES (5)..(5): Any amino acid
  MOD_RES (6)..(6): Any amino acid
  MOD_RES (7)..(7): Any amino acid
  MOD_RES (8)..(8): Any amino acid
XXXXXXXXW

SEQ ID NO: 123 - protein, 10 aa, Artificial Sequence
  Description of Artificial Sequence: Synthetic peptide
  MOD_RES (1)..(1): Any amino acid
  MOD_RES (2)..(2): Ala, Thr or Ser
  MOD_RES (3)..(3): Any amino acid
  MOD_RES (4)..(4): Any amino acid
  MOD_RES (5)..(5): Any amino acid
  MOD_RES (6)..(6): Any amino acid
  MOD_RES (7)..(7): Any amino acid
  MOD_RES (8)..(8): Any amino acid
  MOD_RES (9)..(9): Any amino acid
XXXXXXXXXW

SEQ ID NO: 124 - protein, 11 aa, Artificial Sequence
  Description of Artificial Sequence: Synthetic peptide
  MOD_RES (1)..(1): Any amino acid
  MOD_RES (2)..(2): Ala, Thr or Ser
  MOD_RES (3)..(3): Any amino acid
  MOD_RES (4)..(4): Any amino acid
  MOD_RES (5)..(5): Any amino acid
  MOD_RES (6)..(6): Any amino acid
  MOD_RES (7)..(7): Any amino acid
  MOD_RES (8)..(8): Any amino acid
  MOD_RES (9)..(9): Any amino acid
  MOD_RES (10)..(10): Any amino acid
XXXXXXXXXXW

SEQ ID NO: 125 - protein, 12 aa, Artificial Sequence
  Description of Artificial Sequence: Synthetic peptide
  MOD_RES (1)..(1): Any amino acid
  MOD_RES (2)..(2): Ala, Thr or Ser
  MOD_RES (3)..(3): Any amino acid
  MOD_RES (4)..(4): Any amino acid
  MOD_RES (5)..(5): Any amino acid
  MOD_RES (6)..(6): Any amino acid
  MOD_RES (7)..(7): Any amino acid
  MOD_RES (8)..(8): Any amino acid
  MOD_RES (9)..(9): Any amino acid
  MOD_RES (10)..(10): Any amino acid
  MOD_RES (11)..(11): Any amino acid
XXXXXXXXXXXW

SEQ ID NO: 126 - protein, 8 aa, Artificial Sequence
  Description of Artificial Sequence: Synthetic peptide
  MOD_RES (1)..(1): Any amino acid
  MOD_RES (3)..(3): Any amino acid
  MOD_RES (4)..(4): Any amino acid
  MOD_RES (5)..(5): Any amino acid
  MOD_RES (6)..(6): Any amino acid
  MOD_RES (7)..(7): Any amino acid
XLXXXXXL

SEQ ID NO: 127 - protein, 9 aa, Artificial Sequence
  Description of Artificial Sequence: Synthetic peptide
  MOD_RES (1)..(1): Any amino acid
  MOD_RES (3)..(3): Any amino acid
  MOD_RES (4)..(4): Any amino acid
  MOD_RES (5)..(5): Any amino acid
  MOD_RES (6)..(6): Any amino acid
  MOD_RES (7)..(7): Any amino acid
  MOD_RES (8)..(8): Any amino acid
XLXXXXXXL

SEQ ID NO: 128 - protein, 10 aa, Artificial Sequence
  Description of Artificial Sequence: Synthetic peptide
  MOD_RES (1)..(1): Any amino acid
  MOD_RES (3)..(3): Any amino acid
  MOD_RES (4)..(4): Any amino acid
  MOD_RES (5)..(5): Any amino acid
  MOD_RES (6)..(6): Any amino acid
  MOD_RES (7)..(7): Any amino acid
  MOD_RES (8)..(8): Any amino acid
  MOD_RES (9)..(9): Any amino acid
XLXXXXXXXL

SEQ ID NO: 129 - protein, 11 aa, Artificial Sequence
  Description of Artificial Sequence: Synthetic peptide
  MOD_RES (1)..(1): Any amino acid
  MOD_RES (3)..(3): Any amino acid
  MOD_RES (4)..(4): Any amino acid
  MOD_RES (5)..(5): Any amino acid
  MOD_RES (6)..(6): Any amino acid
  MOD_RES (7)..(7): Any amino acid
  MOD_RES (8)..(8): Any amino acid
  MOD_RES (9)..(9): Any amino acid
  MOD_RES (10)..(10): Any amino acid
XLXXXXXXXXL

SEQ ID NO: 130 - protein, 12 aa, Artificial Sequence
  Description of Artificial Sequence: Synthetic peptide
  MOD_RES (1)..(1): Any amino acid
  MOD_RES (3)..(3): Any amino acid
  MOD_RES (4)..(4): Any amino acid
  MOD_RES (5)..(5): Any amino acid
  MOD_RES (6)..(6): Any amino acid
  MOD_RES (7)..(7): Any amino acid
  MOD_RES (8)..(8): Any amino acid
  MOD_RES (9)..(9): Any amino acid
  MOD_RES (10)..(10): Any amino acid
  MOD_RES (11)..(11): Any amino acid
XLXXXXXXXXXL

SEQ ID NO: 131 - protein, 10 aa, Artificial Sequence
  Description of Artificial Sequence: Synthetic peptide
  MOD_RES (1)..(1): Any amino acid
  MOD_RES (3)..(3): Any amino acid
  MOD_RES (4)..(4): Any amino acid
  MOD_RES (5)..(5): Any amino acid
  MOD_RES (6)..(6): Any amino acid
  MOD_RES (7)..(7): Any amino acid
  MOD_RES (8)..(8): Any amino acid
  MOD_RES (9)..(9): Any amino acid
XAXXXXXXXL

SEQ ID NO: 132 - protein, 9 aa, Artificial Sequence
  Description of Artificial Sequence: Synthetic peptide
  MOD_RES (1)..(1): Any amino acid
  MOD_RES (3)..(3): Any amino acid
  MOD_RES (4)..(4): Any amino acid
  MOD_RES (5)..(5): Any amino acid
  MOD_RES (6)..(6): Any amino acid
  MOD_RES (7)..(7): Any amino acid
  MOD_RES (8)..(8): Any amino acid
XAXXXXXXL

SEQ ID NO: 133 - protein, 10 aa, Artificial Sequence
  Description of Artificial Sequence: Synthetic peptide
  MOD_RES (1)..(1): Any amino acid
  MOD_RES (3)..(3): Any amino acid
  MOD_RES (4)..(4): Any amino acid
  MOD_RES (5)..(5): Any amino acid
  MOD_RES (6)..(6): Any amino acid
  MOD_RES (7)..(7): Any amino acid
  MOD_RES (8)..(8): Any amino acid
  MOD_RES (9)..(9): Any amino acid
XAXXXXXXXL

SEQ ID NO: 134 - protein, 11 aa, Artificial Sequence
  Description of Artificial Sequence: Synthetic peptide
  MOD_RES (1)..(1): Any amino acid
  MOD_RES (3)..(3): Any amino acid
  MOD_RES (4)..(4): Any amino acid
  MOD_RES (5)..(5): Any amino acid
  MOD_RES (6)..(6): Any amino acid
  MOD_RES (7)..(7): Any amino acid
  MOD_RES (8)..(8): Any amino acid
  MOD_RES (9)..(9): Any amino acid
  MOD_RES (10)..(10): Any amino acid
XAXXXXXXXXL

SEQ ID NO: 135 - protein, 12 aa, Artificial Sequence
  Description of Artificial Sequence: Synthetic peptide
  MOD_RES (1)..(1): Any amino acid
  MOD_RES (3)..(3): Any amino acid
  MOD_RES (4)..(4): Any amino acid
  MOD_RES (5)..(5): Any amino acid
  MOD_RES (6)..(6): Any amino acid
  MOD_RES (7)..(7): Any amino acid
  MOD_RES (8)..(8): Any amino acid
  MOD_RES (9)..(9): Any amino acid
  MOD_RES (10)..(10): Any amino acid
  MOD_RES (11)..(11): Any amino acid
XAXXXXXXXXXL

SEQ ID NO: 136 - protein, 8 aa, Artificial Sequence
  Description of Artificial Sequence: Synthetic peptide
  MOD_RES (1)..(1): Any amino acid
  MOD_RES (3)..(3): Any amino acid
  MOD_RES (4)..(4): Any amino acid
  MOD_RES (5)..(5): Any amino acid
  MOD_RES (6)..(6): Any amino acid
  MOD_RES (7)..(7): Any amino acid
  MOD_RES (8)..(8): Leu or Val
XAXXXXXX

SEQ ID NO: 137 - protein, 9 aa, Artificial Sequence
  Description of Artificial Sequence: Synthetic peptide
  MOD_RES (1)..(1): Any amino acid
  MOD_RES (3)..(3): Any amino acid
  MOD_RES (4)..(4): Any amino acid
  MOD_RES (5)..(5): Any amino acid
  MOD_RES (6)..(6): Any amino acid
  MOD_RES (7)..(7): Any amino acid
  MOD_RES (8)..(8): Any amino acid
  MOD_RES (9)..(9): Leu or Val
XAXXXXXXX

SEQ ID NO: 138 - protein, 10 aa, Artificial Sequence
  Description of Artificial Sequence: Synthetic peptide
  MOD_RES (1)..(1): Any amino acid
  MOD_RES (3)..(3): Any amino acid
  MOD_RES (4)..(4): Any amino acid
  MOD_RES (5)..(5): Any amino acid
  MOD_RES (6)..(6): Any amino acid
  MOD_RES (7)..(7): Any amino acid
  MOD_RES (8)..(8): Any amino acid
  MOD_RES (9)..(9): Any amino acid
  MOD_RES (10)..(10): Leu or Val
XAXXXXXXXX

SEQ ID NO: 139 - protein, 11 aa, Artificial Sequence
  Description of Artificial Sequence: Synthetic peptide
  MOD_RES (1)..(1): Any amino acid
  MOD_RES (3)..(3): Any amino acid
  MOD_RES (4)..(4): Any amino acid
  MOD_RES (5)..(5): Any amino acid
  MOD_RES (6)..(6): Any amino acid
  MOD_RES (7)..(7): Any amino acid
  MOD_RES (8)..(8): Any amino acid
  MOD_RES (9)..(9): Any amino acid
  MOD_RES (10)..(10): Any amino acid
  MOD_RES (11)..(11): Leu or Val
XAXXXXXXXXX

SEQ ID NO: 140 - protein, 12 aa, Artificial Sequence
  Description of Artificial Sequence: Synthetic peptide
  MOD_RES (1)..(1): Any amino acid
  MOD_RES (3)..(3): Any amino acid
  MOD_RES (4)..(4): Any amino acid
  MOD_RES (5)..(5): Any amino acid
  MOD_RES (6)..(6): Any amino acid
  MOD_RES (7)..(7): Any amino acid
  MOD_RES (8)..(8): Any amino acid
  MOD_RES (9)..(9): Any amino acid
  MOD_RES (10)..(10): Any amino acid
  MOD_RES (11)..(11): Any amino acid
  MOD_RES (12)..(12): Leu or Val
XAXXXXXXXXXX

SEQ ID NO: 141 - protein, 8 aa, Artificial Sequence
  Description of Artificial Sequence: Synthetic peptide
  MOD_RES (1)..(1): Any amino acid
  MOD_RES (3)..(3): Any amino acid
  MOD_RES (4)..(4): Any amino acid
  MOD_RES (5)..(5): Any amino acid
  MOD_RES (6)..(6): Any amino acid
  MOD_RES (7)..(7): Any amino acid
  MOD_RES (8)..(8): Phe or Tyr
XAXXXXXX

SEQ ID NO: 142 - protein, 9 aa, Artificial Sequence
  Description of Artificial Sequence: Synthetic peptide
  MOD_RES (1)..(1): Any amino acid
  MOD_RES (3)..(3): Any amino acid
  MOD_RES (4)..(4): Any amino acid
  MOD_RES (5)..(5): Any amino acid
  MOD_RES (6)..(6): Any amino acid
  MOD_RES (7)..(7): Any amino acid
  MOD_RES (8)..(8): Any amino acid
  MOD_RES (9)..(9): Phe or Tyr
XAXXXXXXX

SEQ ID NO: 143 - protein, 10 aa, Artificial Sequence
  Description of Artificial Sequence: Synthetic peptide
  MOD_RES (1)..(1): Any amino acid
  MOD_RES (3)..(3): Any amino acid
  MOD_RES (4)..(4): Any amino acid
  MOD_RES (5)..(5): Any amino acid
  MOD_RES (6)..(6): Any amino acid
  MOD_RES (7)..(7): Any amino acid
  MOD_RES (8)..(8): Any amino acid
  MOD_RES (9)..(9): Any amino acid
  MOD_RES (10)..(10): Phe or Tyr
XAXXXXXXXX

SEQ ID NO: 144 - protein, 11 aa, Artificial Sequence
  Description of Artificial Sequence: Synthetic peptide
  MOD_RES (1)..(1): Any amino acid
  MOD_RES (3)..(3): Any amino acid
  MOD_RES (4)..(4): Any amino acid
  MOD_RES (5)..(5): Any amino acid
  MOD_RES (6)..(6): Any amino acid
  MOD_RES (7)..(7): Any amino acid
  MOD_RES (8)..(8): Any amino acid
  MOD_RES (9)..(9): Any amino acid
  MOD_RES (10)..(10): Any amino acid
  MOD_RES (11)..(11): Phe or Tyr
XAXXXXXXXXX

SEQ ID NO: 145 - protein, 12 aa, Artificial Sequence
  Description of Artificial Sequence: Synthetic peptide
  MOD_RES (1)..(1): Any amino acid
  MOD_RES (3)..(3): Any amino acid
  MOD_RES (4)..(4): Any amino acid
  MOD_RES (5)..(5): Any amino acid
  MOD_RES (6)..(6): Any amino acid
  MOD_RES (7)..(7): Any amino acid
  MOD_RES (8)..(8): Any amino acid
  MOD_RES (9)..(9): Any amino acid
  MOD_RES (10)..(10): Any amino acid
  MOD_RES (11)..(11): Any amino acid
  MOD_RES (12)..(12): Phe or Tyr
XAXXXXXXXXXX

SEQ ID NO: 146 - protein, 8 aa, Artificial Sequence
  Description of Artificial Sequence: Synthetic peptide
  MOD_RES (1)..(1): Any amino acid
  MOD_RES (2)..(2): Any amino acid
  MOD_RES (3)..(3): Any amino acid
  MOD_RES (4)..(4): Any amino acid
  MOD_RES (5)..(5): Any amino acid
  MOD_RES (6)..(6): Any amino acid
  MOD_RES (7)..(7): Any amino acid
  MOD_RES (8)..(8): Leu, Phe, Met or Ile
XXXXXXXX

SEQ ID NO: 147 - protein, 9 aa, Artificial Sequence
  Description of Artificial Sequence: Synthetic peptide
  MOD_RES (1)..(1): Any amino acid
  MOD_RES (2)..(2): Any amino acid
  MOD_RES (3)..(3): Any amino acid
  MOD_RES (4)..(4): Any amino acid
  MOD_RES (5)..(5): Any amino acid
  MOD_RES (6)..(6): Any amino acid
  MOD_RES (7)..(7): Any amino acid
  MOD_RES (8)..(8): Any amino acid
  MOD_RES (9)..(9): Leu, Phe, Met or Ile
XXXXXXXXX

SEQ ID NO: 148 - protein, 10 aa, Artificial Sequence
  Description of Artificial Sequence: Synthetic peptide
  MOD_RES (1)..(1): Any amino acid
  MOD_RES (2)..(2): Any amino acid
  MOD_RES (3)..(3): Any amino acid
  MOD_RES (4)..(4): Any amino acid
  MOD_RES (5)..(5): Any amino acid
  MOD_RES (6)..(6): Any amino acid
  MOD_RES (7)..(7): Any amino acid
  MOD_RES (8)..(8): Any amino acid
  MOD_RES (9)..(9): Any amino acid
  MOD_RES (10)..(10): Leu, Phe, Met or Ile
XXXXXXXXXX

SEQ ID NO: 149 - protein, 11 aa, Artificial Sequence
  Description of Artificial Sequence: Synthetic peptide
  MOD_RES (1)..(1): Any amino acid
  MOD_RES (2)..(2): Any amino acid
  MOD_RES (3)..(3): Any amino acid
  MOD_RES (4)..(4): Any amino acid
  MOD_RES (5)..(5): Any amino acid
  MOD_RES (6)..(6): Any amino acid
  MOD_RES (7)..(7): Any amino acid
  MOD_RES (8)..(8): Any amino acid
  MOD_RES (9)..(9): Any amino acid
  MOD_RES (10)..(10): Any amino acid
  MOD_RES (11)..(11): Leu, Phe, Met or Ile
XXXXXXXXXXX

SEQ ID NO: 150 - protein, 12 aa, Artificial Sequence
  Description of Artificial Sequence: Synthetic peptide
  MOD_RES (1)..(1): Any amino acid
  MOD_RES (2)..(2): Any amino acid
  MOD_RES (3)..(3): Any amino acid
  MOD_RES (4)..(4): Any amino acid
  MOD_RES (5)..(5): Any amino acid
  MOD_RES (6)..(6): Any amino acid
  MOD_RES (7)..(7): Any amino acid
  MOD_RES (8)..(8): Any amino acid
  MOD_RES (9)..(9): Any amino acid
  MOD_RES (10)..(10): Any amino acid
  MOD_RES (11)..(11): Any amino acid
  MOD_RES (12)..(12): Leu, Phe, Met or Ile
XXXXXXXXXXXX

SEQ ID NO: 151 - protein, 8 aa, Artificial Sequence
  Description of Artificial Sequence: Synthetic peptide
  MOD_RES (1)..(1): Any amino acid
  MOD_RES (2)..(2): Tyr or Phe
  MOD_RES (3)..(3): Any amino acid
  MOD_RES (4)..(4): Any amino acid
  MOD_RES (5)..(5): Any amino acid
  MOD_RES (6)..(6): Any amino acid
  MOD_RES (7)..(7): Any amino acid
  MOD_RES (8)..(8): Leu, Phe, Met or Ile
XXXXXXXX

SEQ ID NO: 152 - protein, 9 aa, Artificial Sequence
  Description of Artificial Sequence: Synthetic peptide
  MOD_RES (1)..(1): Any amino acid
  MOD_RES (2)..(2): Tyr or Phe
  MOD_RES (3)..(3): Any amino acid
  MOD_RES (4)..(4): Any amino acid
  MOD_RES (5)..(5): Any amino acid
  MOD_RES (6)..(6): Any amino acid
  MOD_RES (7)..(7): Any amino acid
  MOD_RES (8)..(8): Any amino acid
  MOD_RES (9)..(9): Leu, Phe, Met or Ile
XXXXXXXXX

SEQ ID NO: 153 - protein, 10 aa, Artificial Sequence
  Description of Artificial Sequence: Synthetic peptide
  MOD_RES (1)..(1): Any amino acid
  MOD_RES (2)..(2): Tyr or Phe
  MOD_RES (3)..(3): Any amino acid
  MOD_RES (4)..(4): Any amino acid
  MOD_RES (5)..(5): Any amino acid
  MOD_RES (6)..(6): Any amino acid
  MOD_RES (7)..(7): Any amino acid
  MOD_RES (8)..(8): Any amino acid
  MOD_RES (9)..(9): Any amino acid
  MOD_RES (10)..(10): Leu, Phe, Met or Ile
XXXXXXXXXX

SEQ ID NO: 154 - protein, 11 aa, Artificial Sequence
  Description of Artificial Sequence: Synthetic peptide
  MOD_RES (1)..(1): Any amino acid
  MOD_RES (2)..(2): Tyr or Phe
  MOD_RES (3)..(3): Any amino acid
  MOD_RES (4)..(4): Any amino acid
  MOD_RES (5)..(5): Any amino acid
  MOD_RES (6)..(6): Any amino acid
  MOD_RES (7)..(7): Any amino acid
  MOD_RES (8)..(8): Any amino acid
  MOD_RES (9)..(9): Any amino acid
  MOD_RES (10)..(10): Any amino acid
  MOD_RES (11)..(11): Leu, Phe, Met or Ile
XXXXXXXXXXX

SEQ ID NO: 155 - protein, 12 aa, Artificial Sequence
  Description of Artificial Sequence: Synthetic peptide
  MOD_RES (1)..(1): Any amino acid
  MOD_RES (2)..(2): Tyr or Phe
  MOD_RES (3)..(3): Any amino acid
  MOD_RES (4)..(4): Any amino acid
  MOD_RES (5)..(5): Any amino acid
  MOD_RES (6)..(6): Any amino acid
  MOD_RES (7)..(7): Any amino acid
  MOD_RES (8)..(8): Any amino acid
  MOD_RES (9)..(9): Any amino acid
  MOD_RES (10)..(10): Any amino acid
  MOD_RES (11)..(11): Any amino acid
  MOD_RES (12)..(12): Leu, Phe, Met or Ile
XXXXXXXXXXXX

SEQ ID NO: 156 - protein, 8 aa, Artificial Sequence
  Description of Artificial Sequence: Synthetic peptide
  MOD_RES (1)..(1): Any amino acid
  MOD_RES (3)..(3): Any amino acid
  MOD_RES (4)..(4): Any amino acid
  MOD_RES (5)..(5): Any amino acid
  MOD_RES (6)..(6): Any amino acid
  MOD_RES (7)..(7): Any amino acid
  MOD_RES (8)..(8): Leu, Phe, Met or Ile
XPXXXXXX

SEQ ID NO: 157 - protein, 9 aa, Artificial Sequence
  Description of Artificial Sequence: Synthetic peptide
  MOD_RES (1)..(1): Any amino acid
  MOD_RES (3)..(3): Any amino acid
  MOD_RES (4)..(4): Any amino acid
  MOD_RES (5)..(5): Any amino acid
  MOD_RES (6)..(6): Any amino acid
  MOD_RES (7)..(7): Any amino acid
  MOD_RES (8)..(8): Any amino acid
  MOD_RES (9)..(9): Leu, Phe, Met or Ile
XPXXXXXXX

SEQ ID NO: 158 - protein, 10 aa, Artificial Sequence
  Description of Artificial Sequence: Synthetic peptide
  MOD_RES (1)..(1): Any amino acid
  MOD_RES (3)..(3): Any amino acid
  MOD_RES (4)..(4): Any amino acid
  MOD_RES (5)..(5): Any amino acid
  MOD_RES (6)..(6): Any amino acid
  MOD_RES (7)..(7): Any amino acid
  MOD_RES (8)..(8): Any amino acid
  MOD_RES (9)..(9): Any amino acid
  MOD_RES (10)..(10): Leu, Phe, Met or Ile
XPXXXXXXXX

SEQ ID NO: 159 - protein, 11 aa, Artificial Sequence
  Description of Artificial Sequence: Synthetic peptide
  MOD_RES (1)..(1): Any amino acid
  MOD_RES (3)..(3): Any amino acid
  MOD_RES (4)..(4): Any amino acid
  MOD_RES (5)..(5): Any amino acid
  MOD_RES (6)..(6): Any amino acid
  MOD_RES (7)..(7): Any amino acid
  MOD_RES (8)..(8): Any amino acid
  MOD_RES (9)..(9): Any amino acid
  MOD_RES (10)..(10): Any amino acid
  MOD_RES (11)..(11): Leu, Phe, Met or Ile
XPXXXXXXXXX

SEQ ID NO: 160 - protein, 12 aa, Artificial Sequence
  Description of Artificial Sequence: Synthetic peptide
  MOD_RES (1)..(1): Any amino acid
  MOD_RES (3)..(3): Any amino acid
  MOD_RES (4)..(4): Any amino acid
  MOD_RES (5)..(5): Any amino acid
  MOD_RES (6)..(6): Any amino acid
  MOD_RES (7)..(7): Any amino acid
  MOD_RES (8)..(8): Any amino acid
  MOD_RES (9)..(9): Any amino acid
  MOD_RES (10)..(10): Any amino acid
  MOD_RES (11)..(11): Any amino acid
  MOD_RES (12)..(12): Leu, Phe, Met or Ile
XPXXXXXXXXXX

SEQ ID NO: 161 - protein, 8 aa, Artificial Sequence
  Description of Artificial Sequence: Synthetic peptide
  MOD_RES (1)..(1): Any amino acid
  MOD_RES (2)..(2): Any amino acid
  MOD_RES (4)..(4): Any amino acid
  MOD_RES (5)..(5): Any amino acid
  MOD_RES (6)..(6): Any amino acid
  MOD_RES (7)..(7): Any amino acid
  MOD_RES (8)..(8): Leu or Val
XXDXXXXX

SEQ ID NO: 162 - protein, 9 aa, Artificial Sequence
  Description of Artificial Sequence: Synthetic peptide
  MOD_RES (1)..(1): Any amino acid
  MOD_RES (2)..(2): Any amino acid
  MOD_RES (4)..(4): Any amino acid
  MOD_RES (5)..(5): Any amino acid
  MOD_RES (6)..(6): Any amino acid
  MOD_RES (7)..(7): Any amino acid
  MOD_RES (8)..(8): Any amino acid
  MOD_RES (9)..(9): Leu or Val
XXDXXXXXX

SEQ ID NO: 163 - protein, 10 aa, Artificial Sequence
  Description of Artificial Sequence: Synthetic peptide
  MOD_RES (1)..(1): Any amino acid
  MOD_RES (2)..(2): Any amino acid
  MOD_RES (4)..(4): Any amino acid
  MOD_RES (5)..(5): Any amino acid
  MOD_RES (6)..(6): Any amino acid
  MOD_RES (7)..(7): Any amino acid
  MOD_RES (8)..(8): Any amino acid
  MOD_RES (9)..(9): Any amino acid
  MOD_RES (10)..(10): Leu or Val
XXDXXXXXXX

SEQ ID NO: 164 - protein, 11 aa, Artificial Sequence
  Description of Artificial Sequence: Synthetic peptide
  MOD_RES (1)..(1): Any amino acid
  MOD_RES (2)..(2): Any amino acid
  MOD_RES (4)..(4): Any amino acid
  MOD_RES (5)..(5): Any amino acid
  MOD_RES (6)..(6): Any amino acid
  MOD_RES (7)..(7): Any amino acid
  MOD_RES (8)..(8): Any amino acid
  MOD_RES (9)..(9): Any amino acid
  MOD_RES (10)..(10): Any amino acid
  MOD_RES (11)..(11): Leu or Val
XXDXXXXXXXX

SEQ ID NO: 165 - protein, 12 aa, Artificial Sequence
  Description of Artificial Sequence: Synthetic peptide
  MOD_RES (1)..(1): Any amino acid
  MOD_RES (2)..(2): Any amino acid
  MOD_RES (4)..(4): Any amino acid
  MOD_RES (5)..(5): Any amino acid
  MOD_RES (6)..(6): Any amino acid
  MOD_RES (7)..(7): Any amino acid
  MOD_RES (8)..(8): Any amino acid
  MOD_RES (9)..(9): Any amino acid
  MOD_RES (10)..(10): Any amino acid
  MOD_RES (11)..(11): Any amino acid
  MOD_RES (12)..(12): Leu or Val
XXDXXXXXXXXX

SEQ ID NO: 166 - protein, 8 aa, Artificial Sequence
  Description of Artificial Sequence: Synthetic peptide
  MOD_RES (1)..(1): Any amino acid
  MOD_RES (2)..(2): Any amino acid
  MOD_RES (3)..(3): Any amino acid
  MOD_RES (4)..(4): Any amino acid
  MOD_RES (5)..(5): Any amino acid
  MOD_RES (6)..(6): Any amino acid
  MOD_RES (7)..(7): Any amino acid
  MOD_RES (8)..(8): Leu, Val or Ile
XXXXXXXX

SEQ ID NO: 167 - protein, 9 aa, Artificial Sequence
  Description of Artificial Sequence: Synthetic peptide
  MOD_RES (1)..(1): Any amino acid
  MOD_RES (2)..(2): Any amino acid
  MOD_RES (3)..(3): Any amino acid
  MOD_RES (4)..(4): Any amino acid
  MOD_RES (5)..(5): Any amino acid
  MOD_RES (6)..(6): Any amino acid
  MOD_RES (7)..(7): Any amino acid
  MOD_RES (8)..(8): Any amino acid
  MOD_RES (9)..(9): Leu, Val or Ile
XXXXXXXXX

SEQ ID NO: 168 - protein, 10 aa, Artificial Sequence
  Description of Artificial Sequence: Synthetic peptide
  MOD_RES (1)..(1): Any amino acid
  MOD_RES (2)..(2): Any amino acid
  MOD_RES (3)..(3): Any amino acid
  MOD_RES (4)..(4): Any amino acid
  MOD_RES (5)..(5): Any amino acid
  MOD_RES (6)..(6): Any amino acid
  MOD_RES (7)..(7): Any amino acid
  MOD_RES (8)..(8): Any amino acid
  MOD_RES (9)..(9): Any amino acid
  MOD_RES (10)..(10): Leu, Val or Ile
XXXXXXXXXX

SEQ ID NO: 169 - protein, 11 aa, Artificial Sequence
  Description of Artificial Sequence: Synthetic peptide
  MOD_RES (1)..(1): Any amino acid
  MOD_RES (2)..(2): Any amino acid
  MOD_RES (3)..(3): Any amino acid
  MOD_RES (4)..(4): Any amino acid
  MOD_RES (5)..(5): Any amino acid
  MOD_RES (6)..(6): Any amino acid
  MOD_RES (7)..(7): Any amino acid
  MOD_RES (8)..(8): Any amino acid
  MOD_RES (9)..(9): Any amino acid
  MOD_RES (10)..(10): Any amino acid
  MOD_RES (11)..(11): Leu, Val or Ile
XXXXXXXXXXX

SEQ ID NO: 170 - protein, 12 aa, Artificial Sequence
  Description of Artificial Sequence: Synthetic peptide
  MOD_RES (1)..(1): Any amino acid
  MOD_RES (2)..(2): Any amino acid
  MOD_RES (3)..(3): Any amino acid
  MOD_RES (4)..(4): Any amino acid
  MOD_RES (5)..(5): Any amino acid
  MOD_RES (6)..(6): Any amino acid
  MOD_RES (7)..(7): Any amino acid
  MOD_RES (8)..(8): Any amino acid
  MOD_RES (9)..(9): Any amino acid
  MOD_RES (10)..(10): Any amino acid
  MOD_RES (11)..(11): Any amino acid
  MOD_RES (12)..(12): Leu, Val or Ile
XXXXXXXXXXXX

SEQ ID NO: 171 - protein, 8 aa, Artificial Sequence
  Description of Artificial Sequence: Synthetic peptide
  MOD_RES (1)..(1): Any amino acid
  MOD_RES (2)..(2): Any amino acid
  MOD_RES (3)..(3): Any amino acid
  MOD_RES (4)..(4): Any amino acid
  MOD_RES (5)..(5): Any amino acid
  MOD_RES (6)..(6): Any amino acid
  MOD_RES (7)..(7): Any amino acid
XXXXXXXY

SEQ ID NO: 172 - protein, 9 aa, Artificial Sequence
  Description of Artificial Sequence: Synthetic peptide
  MOD_RES (1)..(1): Any amino acid
  MOD_RES (2)..(2): Any amino acid
  MOD_RES (3)..(3): Any amino acid
  MOD_RES (4)..(4): Any amino acid
  MOD_RES (5)..(5): Any amino acid
  MOD_RES (6)..(6): Any amino acid
  MOD_RES (7)..(7): Any amino acid
  MOD_RES (8)..(8): Any amino acid
XXXXXXXXY

SEQ ID NO: 173 - protein, 10 aa, Artificial Sequence
  Description of Artificial Sequence: Synthetic peptide
  MOD_RES (1)..(1): Any amino acid
  MOD_RES (2)..(2): Any amino acid
  MOD_RES (3)..(3): Any amino acid
  MOD_RES (4)..(4): Any amino acid
  MOD_RES (5)..(5): Any amino acid
  MOD_RES (6)..(6): Any amino acid
  MOD_RES (7)..(7): Any amino acid
  MOD_RES (8)..(8): Any amino acid
  MOD_RES (9)..(9): Any amino acid
XXXXXXXXXY

SEQ ID NO: 174 - protein, 11 aa, Artificial Sequence
  Description of Artificial Sequence: Synthetic peptide
  MOD_RES (1)..(1): Any amino acid
  MOD_RES (2)..(2): Any amino acid
  MOD_RES (3)..(3): Any amino acid
  MOD_RES (4)..(4): Any amino acid
  MOD_RES (5)..(5): Any amino acid
  MOD_RES (6)..(6): Any amino acid
  MOD_RES (7)..(7): Any amino acid
  MOD_RES (8)..(8): Any amino acid
  MOD_RES (9)..(9): Any amino acid
  MOD_RES (10)..(10): Any amino acid
XXXXXXXXXXY

SEQ ID NO: 175 - protein, 12 aa, Artificial Sequence
  Description of Artificial Sequence: Synthetic peptide
  MOD_RES (1)..(1): Any amino acid
  MOD_RES (2)..(2): Any amino acid
  MOD_RES (3)..(3): Any amino acid
  MOD_RES (4)..(4): Any amino acid
  MOD_RES (5)..(5): Any amino acid
  MOD_RES (6)..(6): Any amino acid
  MOD_RES (7)..(7): Any amino acid
  MOD_RES (8)..(8): Any amino acid
  MOD_RES (9)..(9): Any amino acid
  MOD_RES (10)..(10): Any amino acid
  MOD_RES (11)..(11): Any amino acid
XXXXXXXXXXXY

SEQ ID NO: 176 - protein, 8 aa, Artificial Sequence
  Description of Artificial Sequence: Synthetic peptide
  MOD_RES (1)..(1): Any amino acid
  MOD_RES (2)..(2): Any amino acid
  MOD_RES (3)..(3): Any amino acid
  MOD_RES (4)..(4): Any amino acid
  MOD_RES (5)..(5): Any amino acid
  MOD_RES (6)..(6): Any amino acid
  MOD_RES (7)..(7): Any amino acid
  MOD_RES (8)..(8): Phe or Leu
XXXXXXXX

SEQ ID NO: 177 - protein, 9 aa, Artificial Sequence
  Description of Artificial Sequence: Synthetic peptide
  MOD_RES (1)..(1): Any amino acid
  MOD_RES (2)..(2): Any amino acid
  MOD_RES (3)..(3): Any amino acid
  MOD_RES (4)..(4): Any amino acid
  MOD_RES (5)..(5): Any amino acid
  MOD_RES (6)..(6): Any amino acid
  MOD_RES (7)..(7): Any amino acid
  MOD_RES (8)..(8): Any amino acid
  MOD_RES (9)..(9): Phe or Leu
XXXXXXXXX

SEQ ID NO: 178 - protein, 10 aa, Artificial Sequence
  Description of Artificial Sequence: Synthetic peptide
  MOD_RES (1)..(1): Any amino acid
  MOD_RES (2)..(2): Any amino acid
  MOD_RES (3)..(3): Any amino acid
  MOD_RES (4)..(4): Any amino acid
  MOD_RES (5)..(5): Any amino acid
  MOD_RES (6)..(6): Any amino acid
  MOD_RES (7)..(7): Any amino acid
  MOD_RES (8)..(8): Any amino acid
  MOD_RES (9)..(9): Any amino acid
  MOD_RES (10)..(10): Phe or Leu
XXXXXXXXXX

SEQ ID NO: 179 - protein, 11 aa, Artificial Sequence
  Description of Artificial Sequence: Synthetic peptide
  MOD_RES (1)..(1): Any amino acid
  MOD_RES (2)..(2): Any amino acid
  MOD_RES (3)..(3): Any amino acid
  MOD_RES (4)..(4): Any amino acid
  MOD_RES (5)..(5): Any amino acid
  MOD_RES (6)..(6): Any amino acid
  MOD_RES (7)..(7): Any amino acid
  MOD_RES (8)..(8): Any amino acid
  MOD_RES (9)..(9): Any amino acid
  MOD_RES (10)..(10): Any amino acid
  MOD_RES (11)..(11): Phe or Leu
XXXXXXXXXXX

SEQ ID NO: 180 - protein, 12 aa, Artificial Sequence
  Description of Artificial Sequence: Synthetic peptide
  MOD_RES (1)..(1): Any amino acid
  MOD_RES (2)..(2): Any amino acid
  MOD_RES (3)..(3): Any amino acid
  MOD_RES (4)..(4): Any amino acid
  MOD_RES (5)..(5): Any amino acid
  MOD_RES (6)..(6): Any amino acid
  MOD_RES (7)..(7): Any amino acid
  MOD_RES (8)..(8): Any amino acid
  MOD_RES (9)..(9): Any amino acid
  MOD_RES (10)..(10): Any amino acid
  MOD_RES (11)..(11): Any amino acid
  MOD_RES (12)..(12): Phe or Leu
XXXXXXXXXXXX

SEQ ID NO: 181 - protein, 8 aa, Artificial Sequence
  Description of Artificial Sequence: Synthetic peptide
  MOD_RES (1)..(1): Any amino acid
  MOD_RES (2)..(2): Any amino acid
  MOD_RES (3)..(3): Any amino acid
  MOD_RES (4)..(4): Any amino acid
  MOD_RES (5)..(5): Any amino acid
  MOD_RES (6)..(6): Any amino acid
  MOD_RES (7)..(7): Any amino acid
XXXXXXXY

SEQ ID NO: 182 - protein, 9 aa, Artificial Sequence
  Description of Artificial Sequence: Synthetic peptide
  MOD_RES (1)..(1): Any amino acid
  MOD_RES (2)..(2): Any amino acid
  MOD_RES (3)..(3): Any amino acid
  MOD_RES (4)..(4): Any amino acid
  MOD_RES (5)..(5): Any amino acid
  MOD_RES (6)..(6): Any amino acid
  MOD_RES (7)..(7): Any amino acid
  MOD_RES (8)..(8): Any amino acid
XXXXXXXXY

SEQ ID NO: 183 - protein, 10 aa, Artificial Sequence
  Description of Artificial Sequence: Synthetic peptide
  MOD_RES (1)..(1): Any amino acid
  MOD_RES (2)..(2): Any amino acid
  MOD_RES (3)..(3): Any amino acid
  MOD_RES (4)..(4): Any amino acid
  MOD_RES (5)..(5): Any amino acid
  MOD_RES (6)..(6): Any amino acid
  MOD_RES (7)..(7): Any amino acid
  MOD_RES (8)..(8): Any amino acid
  MOD_RES (9)..(9): Any amino acid
XXXXXXXXXY

SEQ ID NO: 184 - protein, 11 aa, Artificial Sequence
  Description of Artificial Sequence: Synthetic peptide
  MOD_RES (1)..(1): Any amino acid
  MOD_RES (2)..(2): Any amino acid
  MOD_RES (3)..(3): Any amino acid
  MOD_RES (4)..(4): Any amino acid
  MOD_RES (5)..(5): Any amino acid
  MOD_RES (6)..(6): Any amino acid
  MOD_RES (7)..(7): Any amino acid
  MOD_RES (8)..(8): Any amino acid
  MOD_RES (9)..(9): Any amino acid
  MOD_RES (10)..(10): Any amino acid
XXXXXXXXXXY

SEQ ID NO: 185 - protein, 12 aa, Artificial Sequence
  Description of Artificial Sequence: Synthetic peptide
  MOD_RES (1)..(1): Any amino acid
  MOD_RES (2)..(2): Any amino acid
  MOD_RES (3)..(3): Any amino acid
  MOD_RES (4)..(4): Any amino acid
  MOD_RES (5)..(5): Any amino acid
  MOD_RES (6)..(6): Any amino acid
  MOD_RES (7)..(7): Any amino acid
  MOD_RES (8)..(8): Any amino acid
  MOD_RES (9)..(9): Any amino acid
  MOD_RES (10)..(10): Any amino acid
  MOD_RES (11)..(11): Any amino acid
XXXXXXXXXXXY

SEQ ID NO: 186 - protein, 7 aa, Artificial Sequence
  Description of Artificial Sequence: Synthetic peptide
  MOD_RES (1)..(1): Any amino acid
  MOD_RES (2)..(2): Any amino acid
  MOD_RES (4)..(4): Any amino acid
  MOD_RES (5)..(5): Any amino acid
  MOD_RES (6)..(6): Any amino acid
XXDXXXL

SEQ ID NO: 187 - protein, 8 aa, Artificial Sequence
  Description of Artificial Sequence: Synthetic peptide
  MOD_RES (1)..(1): Any amino acid
  MOD_RES (2)..(2): Any amino acid
  MOD_RES (4)..(4): Any amino acid
  MOD_RES (5)..(5): Any amino acid
  MOD_RES (6)..(6): Any amino acid
  MOD_RES (7)..(7): Any amino acid
XXDXXXXL

SEQ ID NO: 188 - protein, 9 aa, Artificial Sequence
  Description of Artificial Sequence: Synthetic peptide
  MOD_RES (1)..(1): Any amino acid
  MOD_RES (2)..(2): Any amino acid
  MOD_RES (4)..(4): Any amino acid
  MOD_RES (5)..(5): Any amino acid
  MOD_RES (6)..(6): Any amino acid
  MOD_RES (7)..(7): Any amino acid
  MOD_RES (8)..(8): Any amino acid
XXDXXXXXL

SEQ ID NO: 189 - protein, 10 aa, Artificial Sequence
  Description of Artificial Sequence: Synthetic peptide
  MOD_RES (1)..(1): Any amino acid
  MOD_RES (2)..(2): Any amino acid
  MOD_RES (4)..(4): Any amino acid
  MOD_RES (5)..(5): Any amino acid
  MOD_RES (6)..(6): Any amino acid
  MOD_RES (7)..(7): Any amino acid
  MOD_RES (8)..(8): Any amino acid
  MOD_RES (9)..(9): Any amino acid
XXDXXXXXXL

SEQ ID NO: 190 - protein, 11 aa, Artificial Sequence
  Description of Artificial Sequence: Synthetic peptide
  MOD_RES (1)..(1): Any amino acid
  MOD_RES (2)..(2): Any amino acid
  MOD_RES (4)..(4): Any amino acid
  MOD_RES (5)..(5): Any amino acid
  MOD_RES (6)..(6): Any amino acid
  MOD_RES (7)..(7): Any amino acid
  MOD_RES (8)..(8): Any amino acid
  MOD_RES (9)..(9): Any amino acid
  MOD_RES (10)..(10): Any amino acid
XXDXXXXXXXL

SEQ ID NO: 191 - protein, 8 aa, Artificial Sequence
  Description of Artificial Sequence: Synthetic peptide
  MOD_RES (1)..(1): Any amino acid
  MOD_RES (2)..(2): Leu or Met
  MOD_RES (3)..(3): Any amino acid
  MOD_RES (4)..(4): Any amino acid
  MOD_RES (5)..(5): Any amino acid
  MOD_RES (6)..(6): Any amino acid
  MOD_RES (7)..(7): Any amino acid
  MOD_RES (8)..(8): Leu or Val
XXXXXXXX

SEQ ID NO: 192 - protein, 9 aa, Artificial Sequence
  Description of Artificial Sequence: Synthetic peptide
  MOD_RES (1)..(1): Any amino acid
  MOD_RES (2)..(2): Leu or Met
  MOD_RES (3)..(3): Any amino acid
  MOD_RES (4)..(4): Any amino acid
  MOD_RES (5)..(5): Any amino acid
  MOD_RES (6)..(6): Any amino acid
  MOD_RES (7)..(7): Any amino acid
  MOD_RES (8)..(8): Any amino acid
  MOD_RES (9)..(9): Leu or Val
XXXXXXXXX

SEQ ID NO: 193 - protein, 10 aa, Artificial Sequence
  Description of Artificial Sequence: Synthetic peptide
  MOD_RES (1)..(1): Any amino acid
  MOD_RES (2)..(2): Leu or Met
  MOD_RES (3)..(3): Any amino acid
  MOD_RES (4)..(4): Any amino acid
  MOD_RES (5)..(5): Any amino acid
  MOD_RES (6)..(6): Any amino acid
  MOD_RES (7)..(7): Any amino acid
  MOD_RES (8)..(8): Any amino acid
  MOD_RES (9)..(9): Any amino acid
  MOD_RES (10)..(10): Leu or Val
XXXXXXXXXX

SEQ ID NO: 194 - protein, 11 aa, Artificial Sequence
  Description of Artificial Sequence: Synthetic peptide
  MOD_RES (1)..(1): Any amino acid
  MOD_RES (2)..(2): Leu or Met
  MOD_RES (3)..(3): Any amino acid
  MOD_RES (4)..(4): Any amino acid
  MOD_RES (5)..(5): Any amino acid
  MOD_RES (6)..(6): Any amino acid
  MOD_RES (7)..(7): Any amino acid
  MOD_RES (8)..(8): Any amino acid
  MOD_RES (9)..(9): Any amino acid
  MOD_RES (10)..(10): Any amino acid
  MOD_RES (11)..(11): Leu or Val
XXXXXXXXXXX

SEQ ID NO: 195 - protein, 8 aa, Artificial Sequence
  Description of Artificial Sequence: Synthetic peptide
  MOD_RES (1)..(1): Any amino acid
  MOD_RES (2)..(2): Ile, Leu or Val
  MOD_RES (3)..(3): Any amino acid
  MOD_RES (4)..(4): Any amino acid
  MOD_RES (5)..(5): Any amino acid
  MOD_RES (6)..(6): Any amino acid
  MOD_RES (7)..(7): Any amino acid
  MOD_RES (8)..(8): Lys or Arg
XXXXXXXX

SEQ ID NO: 196 - protein, 9 aa, Artificial Sequence
  Description of Artificial Sequence: Synthetic peptide
  MOD_RES (1)..(1): Any amino acid
  MOD_RES (2)..(2): Ile, Leu or Val
  MOD_RES (3)..(3): Any amino acid
  MOD_RES (4)..(4): Any amino acid
  MOD_RES (5)..(5): Any amino acid
  MOD_RES (6)..(6): Any amino acid
  MOD_RES (7)..(7): Any amino acid
  MOD_RES (8)..(8): Any amino acid
  MOD_RES (9)..(9): Lys or Arg
XXXXXXXXX

SEQ ID NO: 197 - protein, 10 aa, Artificial Sequence
  Description of Artificial Sequence: Synthetic peptide
  MOD_RES (1)..(1): Any amino acid
  MOD_RES (2)..(2): Ile, Leu or Val
  MOD_RES (3)..(3): Any amino acid
  MOD_RES (4)..(4): Any amino acid
  MOD_RES (5)..(5): Any amino acid
  MOD_RES (6)..(6): Any amino acid
  MOD_RES (7)..(7): Any amino acid
  MOD_RES (8)..(8): Any amino acid
  MOD_RES (9)..(9): Any amino acid
  MOD_RES (10)..(10): Lys or Arg
XXXXXXXXXX

SEQ ID NO: 198 - protein, 11 aa, Artificial Sequence
  Description of Artificial Sequence: Synthetic peptide
  MOD_RES (1)..(1): Any amino acid
  MOD_RES (2)..(2): Ile, Leu or Val
  MOD_RES (3)..(3): Any amino acid
  MOD_RES (4)..(4): Any amino acid
  MOD_RES (5)..(5): Any amino acid
  MOD_RES (6)..(6): Any amino acid
  MOD_RES (7)..(7): Any amino acid
  MOD_RES (8)..(8): Any amino acid
  MOD_RES (9)..(9): Any amino acid
  MOD_RES (10)..(10): Any amino acid
  MOD_RES (11)..(11): Lys or Arg
XXXXXXXXXXX

SEQ ID NO: 199 - protein, 12 aa, Artificial Sequence
  Description of Artificial Sequence: Synthetic peptide
  MOD_RES (1)..(1): Any amino acid
  MOD_RES (2)..(2): Ile, Leu or Val
  MOD_RES (3)..(3): Any amino acid
  MOD_RES (4)..(4): Any amino acid
  MOD_RES (5)..(5): Any amino acid
  MOD_RES (6)..(6): Any amino acid
  MOD_RES (7)..(7): Any amino acid
  MOD_RES (8)..(8): Any amino acid
  MOD_RES (9)..(9): Any amino acid
  MOD_RES (10)..(10): Any amino acid
  MOD_RES (11)..(11): Any amino acid
  MOD_RES (12)..(12): Lys or Arg
XXXXXXXXXXXX

SEQ ID NO: 200 - protein, 8 aa, Artificial Sequence
  Description of Artificial Sequence: Synthetic peptide
  MOD_RES (1)..(1): Any amino acid
  MOD_RES (2)..(2): Tyr or Phe
  MOD_RES (3)..(3): Any amino acid
  MOD_RES (4)..(4): Any amino acid
  MOD_RES (5)..(5): Any amino acid
  MOD_RES (6)..(6): Any amino acid
  MOD_RES (7)..(7): Any amino acid
  MOD_RES (8)..(8): Lys or Arg
XXXXXXXX

SEQ ID NO: 201 - protein, 9 aa, Artificial Sequence
  Description of Artificial Sequence: Synthetic peptide
  MOD_RES (1)..(1): Any amino acid
  MOD_RES (2)..(2): Tyr or Phe
  MOD_RES (3)..(3): Any amino acid
  MOD_RES (4)..(4): Any amino acid
  MOD_RES (5)..(5): Any amino acid
  MOD_RES (6)..(6): Any amino acid
  MOD_RES (7)..(7): Any amino acid
  MOD_RES (8)..(8): Any amino acid
  MOD_RES (9)..(9): Lys or Arg
XXXXXXXXX

SEQ ID NO: 202 - protein, 10 aa, Artificial Sequence
  Description of Artificial Sequence: Synthetic peptide
  MOD_RES (1)..(1): Any amino acid
  MOD_RES (2)..(2): Tyr or Phe
  MOD_RES (3)..(3): Any amino acid
  MOD_RES (4)..(4): Any amino acid
  MOD_RES (5)..(5): Any amino acid
  MOD_RES (6)..(6): Any amino acid
  MOD_RES (7)..(7): Any amino acid
  MOD_RES (8)..(8): Any amino acid
  MOD_RES (9)..(9): Any amino acid
  MOD_RES (10)..(10): Lys or Arg
XXXXXXXXXX

SEQ ID NO: 203 - protein, 11 aa, Artificial Sequence
  Description of Artificial Sequence: Synthetic peptide
  MOD_RES (1)..(1): Any amino acid
  MOD_RES (2)..(2): Tyr or Phe
  MOD_RES (3)..(3): Any amino acid
  MOD_RES (4)..(4): Any amino acid
  MOD_RES (5)..(5): Any amino acid
  MOD_RES (6)..(6): Any amino acid
  MOD_RES (7)..(7): Any amino acid
  MOD_RES (8)..(8): Any amino acid
  MOD_RES (9)..(9): Any amino acid
  MOD_RES (10)..(10): Any amino acid
  MOD_RES (11)..(11): Lys or Arg
XXXXXXXXXXX

SEQ ID NO: 204 - protein, 12 aa, Artificial Sequence
  Description of Artificial Sequence: Synthetic peptide
  MOD_RES (1)..(1): Any amino acid
  MOD_RES (2)..(2): Tyr or Phe
  MOD_RES (3)..(3): Any amino acid
  MOD_RES (4)..(4): Any amino acid
  MOD_RES (5)..(5): Any amino acid
  MOD_RES (6)..(6): Any amino acid
  MOD_RES (7)..(7): Any amino acid
  MOD_RES (8)..(8): Any amino acid
  MOD_RES (9)..(9): Any amino acid
  MOD_RES (10)..(10): Any amino acid
  MOD_RES (11)..(11): Any amino acid
  MOD_RES (12)..(12): Lys or Arg
XXXXXXXXXXXX

SEQ ID NO: 205 - protein, 8 aa, Artificial Sequence
  Description of Artificial Sequence: Synthetic peptide
  MOD_RES (1)..(1): Any amino acid
  MOD_RES (2)..(2): Asn or Tyr
  MOD_RES (3)..(3): Any amino acid
  MOD_RES (4)..(4): Any amino acid
  MOD_RES (5)..(5): Any amino acid
  MOD_RES (6)..(6): Any amino acid
  MOD_RES (7)..(7): Any amino acid
  MOD_RES (8)..(8): Lys or Arg
XXXXXXXX

SEQ ID NO: 206 - protein, 9 aa, Artificial Sequence
  Description of Artificial Sequence: Synthetic peptide
  MOD_RES (1)..(1): Any amino acid
  MOD_RES (2)..(2): Asn or Tyr
  MOD_RES (3)..(3): Any amino acid
  MOD_RES (4)..(4): Any amino acid
  MOD_RES (5)..(5): Any amino acid
  MOD_RES (6)..(6): Any amino acid
  MOD_RES (7)..(7): Any amino acid
  MOD_RES (8)..(8): Any amino acid
  MOD_RES (9)..(9): Lys or Arg
XXXXXXXXX

SEQ ID NO: 207 - protein, 10 aa, Artificial Sequence
  Description of Artificial Sequence: Synthetic peptide
  MOD_RES (1)..(1): Any amino acid
  MOD_RES (2)..(2): Asn or Tyr
  MOD_RES (3)..(3): Any amino acid
  MOD_RES (4)..(4): Any amino acid
  MOD_RES (5)..(5): Any amino acid
  MOD_RES (6)..(6): Any amino acid
  MOD_RES (7)..(7): Any amino acid
  MOD_RES (8)..(8): Any amino acid
  MOD_RES (9)..(9): Any amino acid
  MOD_RES (10)..(10): Lys or Arg
XXXXXXXXXX

SEQ ID NO: 208 - protein, 11 aa, Artificial Sequence
  Description of Artificial Sequence: Synthetic peptide
  MOD_RES (1)..(1): Any amino acid
  MOD_RES (2)..(2): Asn or Tyr
  MOD_RES (3)..(3): Any amino acid
  MOD_RES (4)..(4): Any amino acid
  MOD_RES (5)..(5): Any amino acid
  MOD_RES (6)..(6): Any amino acid
  MOD_RES (7)..(7): Any amino acid
  MOD_RES (8)..(8): Any amino acid
  MOD_RES (9)..(9): Any amino acid
  MOD_RES (10)..(10): Any amino acid
  MOD_RES (11)..(11): Lys or Arg
XXXXXXXXXXX

SEQ ID NO: 209 - protein, 12 aa, Artificial Sequence
  Description of Artificial Sequence: Synthetic peptide
  MOD_RES (1)..(1): Any amino acid
  MOD_RES (2)..(2): Asn or Tyr
  MOD_RES (3)..(3): Any amino acid
  MOD_RES (4)..(4): Any amino acid
  MOD_RES (5)..(5): Any amino acid
  MOD_RES (6)..(6): Any amino acid
  MOD_RES (7)..(7): Any amino acid
  MOD_RES (8)..(8): Any amino acid
  MOD_RES (9)..(9): Any amino acid
  MOD_RES (10)..(10): Any amino acid
  MOD_RES (11)..(11): Any amino acid
  MOD_RES (12)..(12): Lys or Arg
XXXXXXXXXXXX

SEQ ID NO: 210 - DNA, 24 bp, Artificial Sequence
  Description of Artificial Sequence: Synthetic oligonucleotide
  modified_base (1)..(2): a, c, t, g, unknown or other
  modified_base (7)..(8): a, c, t, g, unknown or other
  modified_base (10)..(11): a, c, t, g, unknown or other
  modified_base (13)..(14): a, c, t, g, unknown or other
  modified_base (16)..(17): a, c, t, g, unknown or other
  modified_base (19)..(20): a, c, t, g, unknown or other
  modified_base (22)..(22): a, c, t, g, unknown or other
nnkmtgnnknnknnknnknnkntg

SEQ ID NO: 211 - DNA, 27 bp, Artificial Sequence
  Description of Artificial Sequence: Synthetic oligonucleotide
  modified_base (1)..(2): a, c, t, g, unknown or other
  modified_base (7)..(8): a, c, t, g, unknown or other
  modified_base (10)..(11): a, c, t, g, unknown or other
  modified_base (13)..(14): a, c, t, g, unknown or other
  modified_base (16)..(17): a, c, t, g, unknown or other
  modified_base (19)..(20): a, c, t, g, unknown or other
  modified_base (22)..(23): a, c, t, g, unknown or other
  modified_base (25)..(25): a, c, t, g, unknown or other
nnkmtgnnknnknnknnknnknnkntg

SEQ ID NO: 212 - DNA, 30 bp, Artificial Sequence
  Description of Artificial Sequence: Synthetic oligonucleotide
  modified_base (1)..(2): a, c, t, g, unknown or other
  modified_base (7)..(8): a, c, t, g, unknown or other
  modified_base (10)..(11): a, c, t, g, unknown or other
  modified_base (13)..(14): a, c, t, g, unknown or other
  modified_base (16)..(17): a, c, t, g, unknown or other
  modified_base (19)..(20): a, c, t, g, unknown or other
  modified_base (22)..(23): a, c, t, g, unknown or other
  modified_base (25)..(26): a, c, t, g, unknown or other
  modified_base (28)..(28): a, c, t, g, unknown or other
nnkmtgnnknnknnknnknnknnknnkntg

SEQ ID NO: 213 - DNA, 33 bp, Artificial Sequence
  Description of Artificial Sequence: Synthetic oligonucleotide
  modified_base (1)..(2): a, c, t, g, unknown or other
  modified_base (7)..(8): a, c, t, g, unknown or other
  modified_base (10)..(11): a, c, t, g, unknown or other
  modified_base (13)..(14): a, c, t, g, unknown or other
  modified_base (16)..(17): a, c, t, g, unknown or other
  modified_base (19)..(20): a, c, t, g, unknown or other
  modified_base (22)..(23): a, c, t, g, unknown or other
  modified_base (25)..(26): a, c, t, g, unknown or other
  modified_base (28)..(29): a, c, t, g, unknown or other
  modified_base (31)..(31): a, c, t, g, unknown or other
nnkmtgnnknnknnknnknnknnknnknnkntg

SEQ ID NO: 214 - DNA, 27 bp, Artificial Sequence
  Description of Artificial Sequence: Synthetic oligonucleotide
  modified_base (1)..(2): a, c, t, g, unknown or other
  modified_base (4)..(5): a, c, t, g, unknown or other
  modified_base (10)..(11): a, c, t, g, unknown or other
  modified_base (13)..(14): a, c, t, g, unknown or other
  modified_base (16)..(17): a, c, t, g, unknown or other
  modified_base (19)..(20): a, c, t, g, unknown or other
  modified_base (22)..(23): a, c, t, g, unknown or other
nnknnkgaknnknnknnknnknnktat

SEQ ID NO: 215 - DNA, 30 bp, Artificial Sequence
  Description of Artificial Sequence: Synthetic oligonucleotide
  modified_base (1)..(2): a, c, t, g, unknown or other
  modified_base (4)..(5): a, c, t, g, unknown or other
  modified_base (10)..(11): a, c, t, g, unknown or other
  modified_base (13)..(14): a, c, t, g, unknown or other
  modified_base (16)..(17): a, c, t, g, unknown or other
  modified_base (19)..(20): a, c, t, g, unknown or other
  modified_base (22)..(23): a, c, t, g, unknown or other
  modified_base (25)..(26): a, c, t, g, unknown or other
nnknnkgaknnknnknnknnknnknnktat

SEQ ID NO: 216 - DNA, 33 bp, Artificial Sequence
  Description of Artificial Sequence: Synthetic oligonucleotide
  modified_base (1)..(2): a, c, t, g, unknown or other
  modified_base (4)..(5): a, c, t, g, unknown or other
  modified_base (10)..(11): a, c, t, g, unknown or other
  modified_base (13)..(14): a, c, t, g, unknown or other
  modified_base (16)..(17): a, c, t, g, unknown or other
  modified_base (19)..(20): a, c, t, g, unknown or other
  modified_base (22)..(23): a, c, t, g, unknown or other
  modified_base (25)..(26): a, c, t, g, unknown or other
  modified_base (28)..(29): a, c, t, g, unknown or other
nnknnkgaknnknnknnknnknnknnknnktat

SEQ ID NO: 217 - DNA, 24 bp, Artificial Sequence
  Description of Artificial Sequence: Synthetic oligonucleotide
  modified_base (1)..(2): a, c, t, g, unknown or other
  modified_base (7)..(8): a, c, t, g, unknown or other
  modified_base (10)..(11): a, c, t, g, unknown or other
  modified_base (13)..(14): a, c, t, g, unknown or other
  modified_base (16)..(17): a, c, t, g, unknown or other
  modified_base (19)..(20): a, c, t, g, unknown or other
nnkvtgnnknnknnknnknnkaaa

SEQ ID NO: 218 - DNA, 27 bp, Artificial Sequence
  Description of Artificial Sequence: Synthetic oligonucleotide
  modified_base (1)..(2): a, c, t, g, unknown or other
  modified_base (7)..(8): a, c, t, g, unknown or other
  modified_base (10)..(11): a, c, t, g, unknown or other
  modified_base (13)..(14): a, c, t, g, unknown or other
  modified_base (16)..(17): a, c, t, g, unknown or other
  modified_base (19)..(20): a, c, t, g, unknown or other
  modified_base (22)..(23): a, c, t, g, unknown or other
nnkvtgnnknnknnknnknnknnkaaa

SEQ ID NO: 219 - DNA, 30 bp, Artificial Sequence
  Description of Artificial Sequence: Synthetic oligonucleotide
  modified_base (1)..(2): a, c, t, g, unknown or other
  modified_base (7)..(8): a, c, t, g, unknown or other
  modified_base (10)..(11): a, c, t, g, unknown or other
  modified_base (13)..(14): a, c, t, g, unknown or other
  modified_base (16)..(17): a, c, t, g, unknown or other
  modified_base (19)..(20): a, c, t, g, unknown or other
  modified_base (22)..(23): a, c, t, g, unknown or other
  modified_base (25)..(26): a, c, t, g, unknown or other
nnkvtgnnknnknnknnknnknnknnkaaa

SEQ ID NO: 220 - DNA, 33 bp, Artificial Sequence
  Description of Artificial Sequence: Synthetic oligonucleotide
  modified_base (1)..(2): a, c, t, g, unknown or other
  modified_base (7)..(8): a, c, t, g, unknown or other
  modified_base (10)..(11): a, c, t, g, unknown or other
  modified_base (13)..(14): a, c, t, g, unknown or other
  modified_base (16)..(17): a, c, t, g, unknown or other
  modified_base (19)..(20): a, c, t, g, unknown or other
  modified_base (22)..(23): a, c, t, g, unknown or other
  modified_base (25)..(26): a, c, t, g, unknown or other
  modified_base (28)..(29): a, c, t, g, unknown or other
nnkvtgnnknnknnknnknnknnknnknnkaaa

SEQ ID NO: 221 - DNA, 36 bp, Artificial Sequence
  Description of Artificial Sequence: Synthetic oligonucleotide
  modified_base (1)..(2): a, c, t, g, unknown or other
  modified_base (7)..(8): a, c, t, g, unknown or other
  modified_base (10)..(11): a, c, t, g, unknown or other
  modified_base (13)..(14): a, c, t, g, unknown or other
  modified_base (16)..(17): a, c, t, g, unknown or other
  modified_base (19)..(20): a, c, t, g, unknown or other
  modified_base (22)..(23): a, c, t, g, unknown or other
  modified_base (25)..(26): a, c, t, g, unknown or other
  modified_base (28)..(29): a, c, t, g, unknown or other
  modified_base (31)..(32): a, c, t, g, unknown or other
nnkvtgnnknnknnknnknnknnknnknnknnkaaa

SEQ ID NO: 222 - DNA, 24 bp, Artificial Sequence
  Description of Artificial Sequence: Synthetic oligonucleotide
  modified_base (1)..(2): a, c, t, g, unknown or other
  modified_base (7)..(8): a, c, t, g, unknown or other
  modified_base (10)..(11): a, c, t, g, unknown or other
  modified_base (13)..(14): a, c, t, g, unknown or other
  modified_base (16)..(17): a, c, t, g, unknown or other
  modified_base (19)..(20): a, c, t, g, unknown or other
nnkbttnnknnknnknnknnkara

SEQ ID NO: 223 - DNA, 27 bp, Artificial Sequence
  Description of Artificial Sequence: Synthetic oligonucleotide
  modified_base (1)..(2): a, c, t, g, unknown or other
  modified_base (7)..(8): a, c, t, g, unknown or other
  modified_base (10)..(11): a, c, t, g, unknown or other
  modified_base (13)..(14): a, c, t, g, unknown or other
  modified_base (16)..(17): a, c, t, g, unknown or other
  modified_base (19)..(20): a, c, t, g, unknown or other
  modified_base (22)..(23): a, c, t, g, unknown or other
nnkbttnnknnknnknnknnknnkara

SEQ ID NO: 224 - DNA, 30 bp, Artificial Sequence
  Description of Artificial Sequence: Synthetic oligonucleotide
  modified_base (1)..(2): a, c, t, g, unknown or other
  modified_base (7)..(8): a, c, t, g, unknown or other
  modified_base (10)..(11): a, c, t, g, unknown or other
  modified_base (13)..(14): a, c, t, g, unknown or other
  modified_base (16)..(17): a, c, t, g, unknown or other
  modified_base (19)..(20): a, c, t, g, unknown or other
  modified_base (22)..(23): a, c, t, g, unknown or other
  modified_base (25)..(26): a, c, t, g, unknown or other
nnkbttnnknnknnknnknnknnknnkara

SEQ ID NO: 225 - DNA, 33 bp, Artificial Sequence
  Description of Artificial Sequence: Synthetic oligonucleotide
  modified_base (1)..(2): a, c, t, g, unknown or other
  modified_base (7)..(8): a, c, t, g, unknown or other
  modified_base (10)..(11): a, c, t, g, unknown or other
  modified_base (13)..(14): a, c, t, g, unknown or other
  modified_base (16)..(17): a, c, t, g, unknown or other
  modified_base (19)..(20): a, c, t, g, unknown or other
  modified_base (22)..(23): a, c, t, g, unknown or other
  modified_base (25)..(26): a, c, t, g, unknown or other
  modified_base (28)..(29): a, c, t, g, unknown or other
nnkbttnnknnknnknnknnknnknnknnkara

SEQ ID NO: 226 - DNA, 36 bp, Artificial Sequence
  Description of Artificial Sequence: Synthetic oligonucleotide
  modified_base (1)..(2): a, c, t, g, unknown or other
  modified_base (7)..(8): a, c, t, g, unknown or other
  modified_base (10)..(11): a, c, t, g, unknown or other
  modified_base (13)..(14): a, c, t, g, unknown or other
  modified_base (16)..(17): a, c, t, g, unknown or other
  modified_base (19)..(20): a, c, t, g, unknown or other
  modified_base (22)..(23): a, c, t, g, unknown or other
  modified_base (25)..(26): a, c, t, g, unknown or other
  modified_base (28)..(29): a, c, t, g, unknown or other
  modified_base (31)..(32): a, c, t, g, unknown or other
nnkbttnnknnknnknnknnknnknnknnknnkara

SEQ ID NO: 227 - DNA, 24 bp, Artificial Sequence
  Description of Artificial Sequence: Synthetic oligonucleotide
  modified_base (1)..(2): a, c, t, g, unknown or other
  modified_base (4)..(5): a, c, t, g, unknown or other
  modified_base (7)..(8): a, c, t, g, unknown or other
  modified_base (10)..(11): a, c, t, g, unknown or other
  modified_base (13)..(14): a, c, t, g, unknown or other
  modified_base (16)..(17): a, c, t, g, unknown or other
  modified_base (19)..(20): a, c, t, g, unknown or other
nnknnknnknnknnknnknnktay

SEQ ID NO: 228 - DNA, 27 bp, Artificial Sequence
  Description of Artificial Sequence: Synthetic oligonucleotide
  modified_base (1)..(2): a, c, t, g, unknown or other
  modified_base (4)..(5): a, c, t, g, unknown or other
  modified_base (7)..(8): a, c, t, g, unknown or other
  modified_base (10)..(11): a, c, t, g, unknown or other
  modified_base (13)..(14): a, c, t, g, unknown or other
  modified_base (16)..(17): a, c, t, g, unknown or other
  modified_base (19)..(20): a, c, t, g, unknown or other
  modified_base (22)..(23): a, c, t, g, unknown or other
nnknnknnknnknnknnknnknnktay

SEQ ID NO: 229 - DNA, 30 bp, Artificial Sequence
  Description of Artificial Sequence: Synthetic oligonucleotide
  modified_base (1)..(2): a, c, t, g, unknown or other
  modified_base (4)..(5): a, c, t, g, unknown or other
  modified_base (7)..(8): a, c, t, g, unknown or other
  modified_base (10)..(11): a, c, t, g, unknown or other
  modified_base (13)..(14): a, c, t, g, unknown or other
  modified_base (16)..(17): a, c, t, g, unknown or other
  modified_base (19)..(20): a, c, t, g, unknown or other
  modified_base (22)..(23): a, c, t, g, unknown or other
  modified_base (25)..(26): a, c, t, g, unknown or other
nnknnknnknnknnknnknnknnknnktay

SEQ ID NO: 230 - DNA, 33 bp, Artificial Sequence
  Description of Artificial Sequence: Synthetic oligonucleotide
  modified_base (1)..(2): a, c, t, g, unknown or other
  modified_base (4)..(5): a, c, t, g, unknown or other
  modified_base (7)..(8): a, c, t, g, unknown or other
  modified_base (10)..(11): a, c, t, g, unknown or other
  modified_base (13)..(14): a, c, t, g, unknown or other
  modified_base (16)..(17): a, c, t, g, unknown or other
  modified_base (19)..(20): a, c, t, g, unknown or other
  modified_base (22)..(23): a, c, t, g, unknown or other
  modified_base (25)..(26): a, c, t, g, unknown or other
  modified_base (28)..(29): a, c, t, g, unknown or other
nnknnknnknnknnknnknnknnknnknnktay

SEQ ID NO: 231 - DNA, 36 bp, Artificial Sequence
  Description of Artificial Sequence: Synthetic oligonucleotide
  modified_base (1)..(2): a, c, t, g, unknown or other
  modified_base (4)..(5): a, c, t, g, unknown or other
  modified_base (7)..(8): a, c, t, g, unknown or other
  modified_base (10)..(11): a, c, t, g, unknown or other
  modified_base (13)..(14): a, c, t, g, unknown or other
  modified_base (16)..(17): a, c, t, g, unknown or other
  modified_base (19)..(20): a, c, t, g, unknown or other
  modified_base (22)..(23): a, c, t, g, unknown or other
  modified_base (25)..(26): a, c, t, g, unknown or other
  modified_base (28)..(29): a, c, t, g, unknown or other
  modified_base (31)..(32): a, c, t, g, unknown or other
nnknnknnknnknnknnknnknnknnknnknnktay

SEQ ID NO: 232 - DNA, 24 bp, Artificial Sequence
  Description of Artificial Sequence: Synthetic oligonucleotide
  modified_base (1)..(2): a, c, t, g, unknown or other
  modified_base (7)..(8): a, c, t, g, unknown or other
  modified_base (10)..(11): a, c, t, g, unknown or other
  modified_base (13)..(14): a, c, t, g, unknown or other
  modified_base (16)..(17): a, c, t, g, unknown or other
  modified_base (19)..(20): a, c, t, g, unknown or other
nnktwtnnknnknnknnknnkhtt

SEQ ID NO: 233 - DNA, 27 bp, Artificial Sequence
  Description of Artificial Sequence: Synthetic oligonucleotide
  modified_base (1)..(2): a, c, t, g, unknown or other
  modified_base (7)..(8): a, c, t, g, unknown or other
  modified_base (10)..(11): a, c, t, g, unknown or other
  modified_base (13)..(14): a, c, t, g, unknown or other
  modified_base (16)..(17): a, c, t, g, unknown or other
  modified_base (19)..(20): a, c, t, g, unknown or other
  modified_base (22)..(23): a, c, t, g, unknown or other
nnktwtnnknnknnknnknnknnkhtt

SEQ ID NO: 234 - DNA, 30 bp, Artificial Sequence
  Description of Artificial Sequence: Synthetic oligonucleotide
  modified_base (1)..(2): a, c, t, g, unknown or other
  modified_base (7)..(8): a, c, t, g, unknown or other
  modified_base (10)..(11): a, c, t, g, unknown or other
  modified_base (13)..(14): a, c, t, g, unknown or other
  modified_base (16)..(17): a, c, t, g, unknown or other
  modified_base (19)..(20): a, c, t, g, unknown or other
  modified_base (22)..(23): a, c, t, g, unknown or other
  modified_base (25)..(26): a, c, t, g, unknown or other
nnktwtnnknnknnknnknnknnknnkhtt

SEQ ID NO: 235 - DNA, 33 bp, Artificial Sequence
  Description of Artificial Sequence: Synthetic oligonucleotide
  modified_base (1)..(2): a, c, t, g, unknown or other
  modified_base (7)..(8): a, c, t, g, unknown or other
  modified_base (10)..(11): a, c, t, g, unknown or other
  modified_base (13)..(14): a, c, t, g, unknown or other
  modified_base (16)..(17): a, c, t, g, unknown or other
  modified_base (19)..(20): a, c, t, g, unknown or other
  modified_base (22)..(23): a, c, t, g, unknown or other
  modified_base (25)..(26): a, c, t, g, unknown or other
  modified_base (28)..(29): a, c, t, g, unknown or other
nnktwtnnknnknnknnknnknnknnknnkhtt

SEQ ID NO: 236 - DNA, 36 bp, Artificial Sequence
  Description of Artificial Sequence: Synthetic oligonucleotide
  modified_base (1)..(2): a, c, t, g, unknown or other
  modified_base (7)..(8): a, c, t, g, unknown or other
  modified_base (10)..(11): a, c, t, g, unknown or other
  modified_base (13)..(14): a, c, t, g, unknown or other
  modified_base (16)..(17): a, c, t, g, unknown or other
  modified_base (19)..(20): a, c, t, g, unknown or other
  modified_base (22)..(23): a, c, t, g, unknown or other
  modified_base (25)..(26): a, c, t, g, unknown or other
  modified_base (28)..(29): a, c, t, g, unknown or other
  modified_base (31)..(32): a, c, t, g, unknown or other
nnktwtnnknnknnknnknnknnknnknnknnkhtt

SEQ ID NO: 237 - DNA, 24 bp, Artificial Sequence
  Description of Artificial Sequence: Synthetic oligonucleotide
  modified_base (1)..(2): a, c, t, g, unknown or other
  modified_base (7)..(8): a, c, t, g, unknown or other
  modified_base (10)..(11): a, c, t, g, unknown or other
  modified_base (13)..(14): a, c, t, g, unknown or other
  modified_base (16)..(17): a, c, t, g, unknown or other
  modified_base (19)..(20): a, c, t, g, unknown or other
nnkbthnnknnknnknnknnktwy

SEQ ID NO: 238 - DNA, 24 bp, Artificial Sequence
  Description of Artificial Sequence: Synthetic oligonucleotide
  modified_base (1)..(2): a, c, t, g, unknown or other
  modified_base (7)..(8): a, c, t, g, unknown or other
  modified_base (10)..(11): a, c, t, g, unknown or other
  modified_base (13)..(14): a, c, t, g, unknown or other
  modified_base (16)..(17): a, c, t, g, unknown or other
  modified_base (19)..(20): a, c, t, g, unknown or other
nnkayynnknnknnknnknnktwy

SEQ ID NO: 239 - DNA, 27 bp, Artificial Sequence
  Description of Artificial Sequence: Synthetic oligonucleotide
  modified_base (1)..(2): a, c, t, g, unknown or other
  modified_base (7)..(8): a, c, t, g, unknown or other
  modified_base (10)..(11): a, c, t, g, unknown or other
  modified_base (13)..(14): a, c, t, g, unknown or other
  modified_base (16)..(17): a, c, t, g, unknown or other
  modified_base (19)..(20): a, c, t, g, unknown or other
  modified_base (22)..(23): a, c, t, g, unknown or other
nnkbthnnknnknnknnknnknnktwy

SEQ ID NO: 240 - DNA, 27 bp, Artificial Sequence
  Description of Artificial Sequence: Synthetic oligonucleotide
  modified_base (1)..(2): a, c, t, g, unknown or other
  modified_base (7)..(8): a, c, t, g, unknown or other
  modified_base (10)..(11): a, c, t, g, unknown or other
  modified_base (13)..(14): a, c, t, g, unknown or other
  modified_base (16)..(17): a, c, t, g, unknown or other
  modified_base (19)..(20): a, c, t, g, unknown or other
  modified_base (22)..(23): a, c, t, g, unknown or other
nnkayynnknnknnknnknnknnktwy

SEQ ID NO: 241 - DNA, 30 bp, Artificial Sequence
  Description of Artificial Sequence: Synthetic oligonucleotide
  modified_base (1)..(2): a, c, t, g, unknown or other
  modified_base (7)..(8): a, c, t, g, unknown or other
  modified_base (10)..(11): a, c, t, g, unknown or other
  modified_base (13)..(14): a, c, t, g, unknown or other
  modified_base (16)..(17): a, c, t, g, unknown or other
  modified_base (19)..(20): a, c, t, g, unknown or other
  modified_base (22)..(23): a, c, t, g, unknown or other
  modified_base (25)..(26): a, c, t, g, unknown or other
nnkbthnnknnknnknnknnknnknnktwy

SEQ ID NO: 242 - DNA, 30 bp, Artificial Sequence
  Description of Artificial Sequence: Synthetic oligonucleotide
  modified_base (1)..(2): a, c, t, g, unknown or other
  modified_base (7)..(8): a, c, t, g, unknown or other
  modified_base (10)..(11): a, c, t, g, unknown or other
  modified_base (13)..(14): a, c, t, g, unknown or other
  modified_base (16)..(17): a, c, t, g, unknown or other
  modified_base (19)..(20): a, c, t, g, unknown or other
  modified_base (22)..(23): a, c, t, g, unknown or other
  modified_base (25)..(26): a, c, t, g, unknown or other
nnkayynnknnknnknnknnknnknnktwy

SEQ ID NO: 243 - DNA, 33 bp, Artificial Sequence
  Description of Artificial Sequence: Synthetic oligonucleotide
  modified_base (1)..(2): a, c, t, g, unknown or other
  modified_base (7)..(8): a, c, t, g, unknown or other
  modified_base (10)..(11): a, c, t, g, unknown or other
  modified_base (13)..(14): a, c, t, g, unknown or other
  modified_base (16)..(17): a, c, t, g, unknown or other
  modified_base (19)..(20): a, c, t, g, unknown or other
  modified_base (22)..(23): a, c, t, g, unknown or other
  modified_base (25)..(26): a, c, t, g, unknown or other
  modified_base (28)..(29): a, c, t, g, unknown or other
nnkbthnnknnknnknnknnknnknnknnktwy

SEQ ID NO: 244 - DNA, 33 bp, Artificial Sequence
  Description of Artificial Sequence: Synthetic oligonucleotide
  modified_base (1)..(2): a, c, t, g, unknown or other
  modified_base (7)..(8): a, c, t, g, unknown or other
  modified_base (10)..(11): a, c, t, g, unknown or other
  modified_base (13)..(14): a, c, t, g, unknown or other
  modified_base (16)..(17): a, c, t, g, unknown or other
  modified_base (19)..(20): a, c, t, g, unknown or other
  modified_base (22)..(23): a, c, t, g, unknown or other
  modified_base (25)..(26): a, c, t, g, unknown or other
  modified_base (28)..(29): a, c, t, g, unknown or other
nnkayynnknnknnknnknnknnknnknnktwy

SEQ ID NO: 245 - DNA, 36 bp, Artificial Sequence
  Description of Artificial Sequence: Synthetic oligonucleotide
  modified_base (1)..(2): a, c, t, g, unknown or other
  modified_base (7)..(8): a, c, t, g, unknown or other
  modified_base (10)..(11): a, c, t, g, unknown or other
  modified_base (13)..(14): a, c, t, g, unknown or other
  modified_base (16)..(17): a, c, t, g, unknown or other
  modified_base (19)..(20): a, c, t, g, unknown or other
  modified_base (22)..(23): a, c, t, g, unknown or other
  modified_base (25)..(26): a, c, t, g, unknown or other
  modified_base (28)..(29): a, c, t, g, unknown or other
  modified_base (31)..(32): a, c, t, g, unknown or other
nnkbthnnknnknnknnknnknnknnknnknnktwy

SEQ ID NO: 246 - DNA, 36 bp, Artificial Sequence
  Description of Artificial Sequence: Synthetic oligonucleotide
  modified_base (1)..(2): a, c, t, g, unknown or other
  modified_base (7)..(8): a, c, t, g, unknown or other
  modified_base (10)..(11): a, c, t, g, unknown or other
  modified_base (13)..(14): a, c, t, g, unknown or other
  modified_base (16)..(17): a, c, t, g, unknown or other
  modified_base (19)..(20): a, c, t, g, unknown or other
  modified_base (22)..(23): a, c, t, g, unknown or other
  modified_base (25)..(26): a, c, t, g, unknown or other
  modified_base (28)..(29): a, c, t, g, unknown or other
  modified_base (31)..(32): a, c, t, g, unknown or other
nnkayynnknnknnknnknnknnknnknnknnktwy

SEQ ID NO: 247 - DNA, 24 bp, Artificial Sequence
  Description of Artificial Sequence: Synthetic oligonucleotide
  modified_base (1)..(2): a, c, t, g, unknown or other
  modified_base (7)..(8): a, c, t, g, unknown or other
  modified_base (10)..(11): a, c, t, g, unknown or other
  modified_base (13)..(14): a, c, t, g, unknown or other
  modified_base (16)..(17): a, c, t, g, unknown or other
  modified_base (19)..(20): a, c, t, g, unknown or other
  modified_base (24)..(24): a, c, t, g, unknown or other
nnktwynnknnknnknnknnkctn

SEQ ID NO: 248 - DNA, 27 bp, Artificial Sequence
  Description of Artificial Sequence: Synthetic oligonucleotide
  modified_base (1)..(2): a, c, t, g, unknown or other
  modified_base (7)..(8): a, c, t, g, unknown or other
  modified_base (10)..(11): a, c, t, g, unknown or other
  modified_base (13)..(14): a, c, t, g, unknown or other
  modified_base (16)..(17): a, c, t, g, unknown or other
  modified_base (19)..(20): a, c, t, g, unknown or other
  modified_base (22)..(23): a, c, t, g, unknown or other
  modified_base (27)..(27): a, c, t, g, unknown or other
nnktwynnknnknnknnknnknnkctn

SEQ ID NO: 249 - DNA, 30 bp, Artificial Sequence
  Description of Artificial Sequence: Synthetic oligonucleotide
  modified_base (1)..(2): a, c, t, g, unknown or other
  modified_base (7)..(8): a, c, t, g, unknown or other
  modified_base (10)..(11): a, c, t, g, unknown or other
  modified_base (13)..(14): a, c, t, g, unknown or other
  modified_base (16)..(17): a, c, t, g, unknown or other
  modified_base (19)..(20): a, c, t, g, unknown or other
  modified_base (22)..(23): a, c, t, g, unknown or other
  modified_base (25)..(26): a, c, t, g, unknown or other
  modified_base (30)..(30): a, c, t, g, unknown or other
nnktwynnknnknnknnknnknnknnkctn

SEQ ID NO: 250 - DNA, 33 bp, Artificial Sequence
  Description of Artificial Sequence: Synthetic oligonucleotide
  modified_base (1)..(2): a, c, t, g, unknown or other
  modified_base (7)..(8): a, c, t, g, unknown or other
  modified_base (10)..(11): a, c, t, g, unknown or other
  modified_base (13)..(14): a, c, t, g, unknown or other
  modified_base (16)..(17): a, c, t, g, unknown or other
  modified_base (19)..(20): a, c, t, g, unknown or other
  modified_base (22)..(23): a, c, t, g, unknown or other
  modified_base (25)..(26): a, c, t, g, unknown or other
  modified_base (28)..(29): a, c, t, g, unknown or other
  modified_base (33)..(33): a, c, t, g, unknown or other
nnktwynnknnknnknnknnknnknnknnkctn

SEQ ID NO: 251 - DNA, 36 bp, Artificial Sequence
  Description of Artificial Sequence: Synthetic oligonucleotide
  modified_base (1)..(2): a, c, t, g, unknown or other
  modified_base (7)..(8): a, c, t, g, unknown or other
  modified_base (10)..(11): a, c, t, g, unknown or other
  modified_base (13)..(14): a, c, t, g, unknown or other
  modified_base (16)..(17): a, c, t, g, unknown or other
  modified_base (19)..(20): a, c, t, g, unknown or other
  modified_base (22)..(23): a, c, t, g, unknown or other
  modified_base (25)..(26): a, c, t, g, unknown or other
  modified_base (28)..(29): a, c, t, g, unknown or other
  modified_base (31)..(32): a, c, t, g, unknown or other
  modified_base (36)..(36): a, c, t, g, unknown or other
nnktwynnknnknnknnknnknnknnknnknnkctn

SEQ ID NO: 252 - DNA, 24 bp, Artificial Sequence
  Description of Artificial Sequence: Synthetic oligonucleotide
  modified_base (1)..(2): a, c, t, g, unknown or other
  modified_base (4)..(5): a, c, t, g, unknown or other
  modified_base (7)..(8): a, c, t, g, unknown or other
  modified_base (10)..(11): a, c, t, g, unknown or other
  modified_base (13)..(14): a, c, t, g, unknown or other
  modified_base (16)..(17): a, c, t, g, unknown or other
  modified_base (19)..(20): a, c, t, g, unknown or other
nnknnknnknnknnknnknnkarr

SEQ ID NO: 253 - DNA, 27 bp, Artificial Sequence
  Description of Artificial Sequence: Synthetic oligonucleotide
  modified_base (1)..(2): a, c, t, g, unknown or other
  modified_base (4)..(5): a, c, t, g, unknown or other
  modified_base (7)..(8): a, c, t, g, unknown or other
  modified_base (10)..(11): a, c, t, g, unknown or other
  modified_base (13)..(14): a, c, t, g, unknown or other
  modified_base (16)..(17): a, c, t, g, unknown or other
  modified_base (19)..(20): a, c, t, g, unknown or other
  modified_base (22)..(23): a, c, t, g, unknown or other
nnknnknnknnknnknnknnknnkarr

SEQ ID NO: 254 - DNA, 30 bp, Artificial Sequence
  Description of Artificial Sequence: Synthetic oligonucleotide
  modified_base (1)..(2): a, c, t, g, unknown or other
  modified_base (4)..(5): a, c, t, g, unknown or other
  modified_base (7)..(8): a, c, t, g, unknown or other
  modified_base (10)..(11): a, c, t, g, unknown or other
  modified_base (13)..(14): a, c, t, g, unknown or other
  modified_base (16)..(17): a, c, t, g, unknown or other
  modified_base (19)..(20): a, c, t, g, unknown or other
  modified_base (22)..(23): a, c, t, g, unknown or other
  modified_base (25)..(26): a, c, t, g, unknown or other
nnknnknnknnknnknnknnknnknnkarr

SEQ ID NO: 255 - DNA, 33 bp, Artificial Sequence
  Description of Artificial Sequence: Synthetic oligonucleotide
  modified_base (1)..(2): a, c, t, g, unknown or other
  modified_base (4)..(5): a, c, t, g, unknown or other
  modified_base (7)..(8): a, c, t, g, unknown or other
  modified_base (10)..(11): a, c, t, g, unknown or other
  modified_base (13)..(14): a, c, t, g, unknown or other
  modified_base (16)..(17): a, c, t, g, unknown or other
  modified_base (19)..(20): a, c, t, g, unknown or other
  modified_base (22)..(23): a, c, t, g, unknown or other
  modified_base (25)..(26): a, c, t, g, unknown or other
  modified_base (28)..(29): a, c, t, g, unknown or other
nnknnknnknnknnknnknnknnknnknnkarr

SEQ ID NO: 256 - DNA, 36 bp, Artificial Sequence
  Description of Artificial Sequence: Synthetic oligonucleotide
  modified_base (1)..(2): a, c, t, g, unknown or other
  modified_base (4)..(5): a, c, t, g, unknown or other
  modified_base (7)..(8): a, c, t, g, unknown or other
  modified_base (10)..(11): a, c, t, g, unknown or other
  modified_base (13)..(14): a, c, t, g, unknown or other
  modified_base (16)..(17): a, c, t, g, unknown or other
  modified_base (19)..(20): a, c, t, g, unknown or other
  modified_base (22)..(23): a, c, t, g, unknown or other
  modified_base (25)..(26): a, c, t, g, unknown or other
  modified_base (28)..(29): a, c, t, g, unknown or other
  modified_base (31)..(32): a, c, t, g, unknown or other
nnknnknnknnknnknnknnknnknnknnknnkarr

SEQ ID NO: 257 - DNA, 24 bp, Artificial Sequence
  Description of Artificial Sequence: Synthetic oligonucleotide
  modified_base (1)..(2): a, c, t, g, unknown or other
  modified_base (4)..(5): a, c, t, g, unknown or other
  modified_base (7)..(8): a, c, t, g, unknown or other
  modified_base (10)..(11): a, c, t, g, unknown or other
  modified_base (13)..(14): a, c, t, g, unknown or other
  modified_base (16)..(17): a, c, t, g, unknown or other
  modified_base (19)..(20): a, c, t, g, unknown or other
nnknnknnknnknnknnknnkarr

SEQ ID NO: 258 - DNA, 27 bp, Artificial Sequence
  Description of Artificial Sequence: Synthetic oligonucleotide
  modified_base (1)..(2): a, c, t, g, unknown or other
  modified_base (4)..(5): a, c, t, g, unknown or other
  modified_base (7)..(8): a, c, t, g, unknown or other
  modified_base (10)..(11): a, c, t, g, unknown or other
  modified_base (13)..(14): a, c, t, g, unknown or other
  modified_base (16)..(17): a, c, t, g, unknown or other
  modified_base (19)..(20): a, c, t, g, unknown or other
  modified_base (22)..(23): a, c, t, g, unknown or other
nnknnknnknnknnknnknnknnkarr

SEQ ID NO: 259 - DNA, 30 bp, Artificial Sequence; identical to SEQ ID NO: 254
  Description of Artificial Sequence: Synthetic oligonucleotide
  modified_base (1)..(2): a, c, t, g, unknown or other
  modified_base (4)..(5): a, c, t, g, unknown or other
  modified_base (7)..(8): a, c, t, g, unknown or other
  modified_base (10)..(11): a, c, t, g, unknown or other
  modified_base (13)..(14): a, c, t, g, unknown or other
  modified_base (16)..(17): a, c, t, g, unknown or other
  modified_base (19)..(20): a, c, t, g, unknown or other
  modified_base (22)..(23): a, c, t, g, unknown or other
  modified_base (25)..(26): a, c, t, g, unknown or other

SEQ ID NO: 260 - DNA, 33 bp, Artificial Sequence; identical to SEQ ID NO: 255
  Description of Artificial Sequence: Synthetic oligonucleotide
  modified_base (1)..(2): a, c, t, g, unknown or other
  modified_base (4)..(5): a, c, t, g, unknown or other
  modified_base (7)..(8): a, c, t, g, unknown or other
  modified_base (10)..(11): a, c, t, g, unknown or other
  modified_base (13)..(14): a, c, t, g, unknown or other
  modified_base (16)..(17): a, c, t, g, unknown or other
  modified_base (19)..(20): a, c, t, g, unknown or other
  modified_base (22)..(23): a, c, t, g, unknown or other
  modified_base (25)..(26): a, c, t, g, unknown or other
  modified_base (28)..(29): a, c, t, g, unknown or other

SEQ ID NO: 261 - DNA, 36 bp, Artificial Sequence; identical to SEQ ID NO: 256
  Description of Artificial Sequence: Synthetic oligonucleotide
  modified_base (1)..(2): a, c, t, g, unknown or other
  modified_base (4)..(5): a, c, t, g, unknown or other
  modified_base (7)..(8): a, c, t, g, unknown or other
  modified_base (10)..(11): a, c, t, g, unknown or other
  modified_base (13)..(14): a, c, t, g, unknown or other
  modified_base (16)..(17): a, c, t, g, unknown or other
  modified_base (19)..(20): a, c, t, g, unknown or other
  modified_base (22)..(23): a, c, t, g, unknown or other
  modified_base (25)..(26): a, c, t, g, unknown or other
  modified_base (28)..(29): a, c, t, g, unknown or other
  modified_base (31)..(32): a, c, t, g, unknown or other

SEQ ID NO: 262 - DNA, 24 bp, Artificial Sequence
  Description of Artificial Sequence: Synthetic oligonucleotide
  modified_base (1)..(2): a, c, t, g, unknown or other
  modified_base (7)..(8): a, c, t, g, unknown or other
  modified_base (10)..(11): a, c, t, g, unknown or other
  modified_base (13)..(14): a, c, t, g, unknown or other
  modified_base (16)..(17): a, c, t, g, unknown or other
  modified_base (19)..(20): a, c, t, g, unknown or other
nnkgttnnknnknnknnknnkarr

SEQ ID NO: 263 - DNA, 27 bp, Artificial Sequence
  Description of Artificial Sequence: Synthetic oligonucleotide
  modified_base (1)..(2): a, c, t, g, unknown or other
  modified_base (7)..(8): a, c, t, g, unknown or other
  modified_base (10)..(11): a, c, t, g, unknown or other
  modified_base (13)..(14): a, c, t, g, unknown or other
  modified_base (16)..(17): a, c, t, g, unknown or other
  modified_base (19)..(20): a, c, t, g, unknown or other
  modified_base (22)..(23): a, c, t, g, unknown or other
nnkgttnnknnknnknnknnknnkarr

SEQ ID NO: 264 - DNA, 30 bp, Artificial Sequence
  Description of Artificial Sequence: Synthetic oligonucleotide
  modified_base (1)..(2): a, c, t, g, unknown or other
  modified_base (7)..(8): a, c, t, g, unknown or other
  modified_base (10)..(11): a, c, t, g, unknown or other
  modified_base (13)..(14): a, c, t, g, unknown or other
  modified_base (16)..(17): a, c, t, g, unknown or other
  modified_base (19)..(20): a, c, t, g, unknown or other
  modified_base (22)..(23): a, c, t, g, unknown or other
  modified_base (25)..(26): a, c, t, g, unknown or other
nnkgttnnknnknnknnknnknnknnkarr

SEQ ID NO: 265 - DNA, 33 bp, Artificial Sequence
  Description of Artificial Sequence: Synthetic oligonucleotide
  modified_base (1)..(2): a, c, t, g, unknown or other
  modified_base (7)..(8): a, c, t, g, unknown or other
  modified_base (10)..(11): a, c, t, g, unknown or other
  modified_base (13)..(14): a, c, t, g, unknown or other
  modified_base (16)..(17): a, c, t, g, unknown or other
  modified_base (19)..(20): a, c, t, g, unknown or other
  modified_base (22)..(23): a, c, t, g, unknown or other
  modified_base (25)..(26): a, c, t, g, unknown or other
  modified_base (28)..(29): a, c, t, g, unknown or other
nnkgttnnknnknnknnknnknnknnknnkarr

SEQ ID NO: 266 - DNA, 36 bp, Artificial Sequence
  Description of Artificial Sequence: Synthetic oligonucleotide
  modified_base (1)..(2): a, c, t, g, unknown or other
  modified_base (7)..(8): a, c, t, g, unknown or other
  modified_base (10)..(11): a, c, t, g, unknown or other
  modified_base (13)..(14): a, c, t, g, unknown or other
  modified_base (16)..(17): a, c, t, g, unknown or other
  modified_base (19)..(20): a, c, t, g, unknown or other
  modified_base (22)..(23): a, c, t, g, unknown or other
  modified_base (25)..(26): a, c, t, g, unknown or other
  modified_base (28)..(29): a, c, t, g, unknown or other
  modified_base (31)..(32): a, c, t, g, unknown or other
nnkgttnnknnknnknnknnknnknnknnknnkarr

SEQ ID NO: 267 - DNA, 24 bp, Artificial Sequence
  Description of Artificial Sequence: Synthetic oligonucleotide
  modified_base (1)..(2): a, c, t, g, unknown or other
  modified_base (7)..(8): a, c, t, g, unknown or other
  modified_base (10)..(11): a, c, t, g, unknown or other
  modified_base (13)..(14): a, c, t, g, unknown or other
  modified_base (16)..(17): a, c, t, g, unknown or other
  modified_base (19)..(20): a, c, t, g, unknown or other
nnkactnnknnknnknnknnkarr

SEQ ID NO: 268 - DNA, 27 bp, Artificial Sequence
  Description of Artificial Sequence: Synthetic oligonucleotide
  modified_base (1)..(2): a, c, t, g, unknown or other
  modified_base (7)..(8): a, c, t, g, unknown or other
  modified_base (10)..(11): a, c, t, g, unknown or other
  modified_base (13)..(14): a, c, t, g, unknown or other
  modified_base (16)..(17): a, c, t, g, unknown or other
  modified_base (19)..(20): a, c, t, g, unknown or other
  modified_base (22)..(23): a, c, t, g, unknown or other
nnkactnnknnknnknnknnknnkarr

SEQ ID NO: 269 - DNA, 30 bp, Artificial Sequence
  Description of Artificial Sequence: Synthetic oligonucleotide
  modified_base (1)..(2): a, c, t, g, unknown or other
  modified_base (7)..(8): a, c, t, g, unknown or other
  modified_base (10)..(11): a, c, t, g, unknown or other
  modified_base (13)..(14): a, c, t, g, unknown or other
  modified_base (16)..(17): a, c, t, g, unknown or other
  modified_base (19)..(20): a, c, t, g, unknown or other
  modified_base (22)..(23): a, c, t, g, unknown or other
  modified_base (25)..(26): a, c, t, g, unknown or other
nnkactnnknnknnknnknnknnknnkarr

SEQ ID NO: 270 - DNA, 33 bp, Artificial Sequence
  Description of Artificial Sequence: Synthetic oligonucleotide
  modified_base (1)..(2): a, c, t, g, unknown or other
  modified_base (7)..(8): a, c, t, g, unknown or other
  modified_base (10)..(11): a, c, t, g, unknown or other
  modified_base (13)..(14): a, c, t, g, unknown or other
  modified_base (16)..(17): a, c, t, g, unknown or other
  modified_base (19)..(20): a, c, t, g, unknown or other
  modified_base (22)..(23): a, c, t, g, unknown or other
  modified_base (25)..(26): a, c, t, g, unknown or other
  modified_base (28)..(29): a, c, t, g, unknown or other
nnkactnnknnknnknnknnknnknnknnkarr

SEQ ID NO: 271 - DNA, 36 bp, Artificial Sequence
  Description of Artificial Sequence: Synthetic oligonucleotide
  modified_base (1)..(2): a, c, t, g, unknown or other
  modified_base (7)..(8): a, c, t, g, unknown or other
  modified_base (10)..(11): a, c, t, g, unknown or other
  modified_base (13)..(14): a, c, t, g, unknown or other
  modified_base (16)..(17): a, c, t, g, unknown or other
  modified_base (19)..(20): a, c, t, g, unknown or other
  modified_base (22)..(23): a, c, t, g, unknown or other
  modified_base (25)..(26): a, c, t, g, unknown or other
  modified_base (28)..(29): a, c, t, g, unknown or other
  modified_base (31)..(32): a, c, t, g, unknown or other
nnkactnnknnknnknnknnknnknnknnknnkarr

SEQ ID NO: 272 - DNA, 24 bp, Artificial Sequence
  Description of Artificial Sequence: Synthetic oligonucleotide
  modified_base (1)..(2): a, c, t, g, unknown or other
  modified_base (7)..(8): a, c, t, g, unknown or other
  modified_base (10)..(11): a, c, t, g, unknown or other
  modified_base (13)..(14): a, c, t, g, unknown or other
  modified_base (16)..(17): a, c, t, g, unknown or other
  modified_base (19)..(20): a, c, t, g, unknown or other
nnkcctnnknnknnknnknnkctt

SEQ ID NO: 273 - DNA, 27 bp, Artificial Sequence
  Description of Artificial Sequence: Synthetic oligonucleotide
  modified_base (1)..(2): a, c, t, g, unknown or other
  modified_base (7)..(8): a, c, t, g, unknown or other
  modified_base (10)..(11): a, c, t, g, unknown or other
  modified_base (13)..(14): a, c, t, g, unknown or other
  modified_base (16)..(17): a, c, t, g, unknown or other
  modified_base (19)..(20): a, c, t, g, unknown or other
  modified_base (22)..(23): a, c, t, g, unknown or other
nnkcctnnknnknnknnknnknnkctt

SEQ ID NO: 274 - DNA, 30 bp, Artificial Sequence
  Description of Artificial Sequence: Synthetic oligonucleotide
  modified_base (1)..(2): a, c, t, g, unknown or other
  modified_base (7)..(8): a, c, t, g, unknown or other
  modified_base (10)..(11): a, c, t, g, unknown or other
  modified_base (13)..(14): a, c, t, g, unknown or other
  modified_base (16)..(17): a, c, t, g, unknown or other
  modified_base (19)..(20): a, c, t, g, unknown or other
  modified_base (22)..(23): a, c, t, g, unknown or other
  modified_base (25)..(26): a, c, t, g, unknown or other
nnkcctnnknnknnknnknnknnknnkctt

SEQ ID NO: 275 - DNA, 33 bp, Artificial Sequence
  Description of Artificial Sequence: Synthetic oligonucleotide
  modified_base (1)..(2): a, c, t, g, unknown or other
  modified_base (7)..(8): a, c, t, g, unknown or other
  modified_base (10)..(11): a, c, t, g, unknown or other
  modified_base (13)..(14): a, c, t, g, unknown or other
  modified_base (16)..(17): a, c, t, g, unknown or other
  modified_base (19)..(20): a, c, t, g, unknown or other
  modified_base (22)..(23): a, c, t, g, unknown or other
  modified_base (25)..(26): a, c, t, g, unknown or other
  modified_base (28)..(29): a, c, t, g, unknown or other
nnkcctnnknnknnknnknnknnknnknnkctt

SEQ ID NO: 276 - DNA, 36 bp, Artificial Sequence
  Description of Artificial Sequence: Synthetic oligonucleotide
  modified_base (1)..(2): a, c, t, g, unknown or other
  modified_base (7)..(8): a, c, t, g, unknown or other
  modified_base (10)..(11): a, c, t, g, unknown or other
  modified_base (13)..(14): a, c, t, g, unknown or other
  modified_base (16)..(17): a, c, t, g, unknown or other
  modified_base (19)..(20): a, c, t, g, unknown or other
  modified_base (22)..(23): a, c, t, g, unknown or other
  modified_base (25)..(26): a, c, t, g, unknown or other
  modified_base (28)..(29): a, c, t, g, unknown or other
  modified_base (31)..(32): a, c, t, g, unknown or other
nnkcctnnknnknnknnknnknnknnknnknnkctt

SEQ ID NO: 277 - DNA, 24 bp, Artificial Sequence
  Description of Artificial Sequence: Synthetic oligonucleotide
  modified_base (1)..(2): a, c, t, g, unknown or other
  modified_base (4)..(5): a, c, t, g, unknown or other
  modified_base (10)..(11): a, c, t, g, unknown or other
  modified_base (16)..(17): a, c, t, g, unknown or other
  modified_base (19)..(20): a, c, t, g, unknown or other
nnknnkaaannkarannknnkctt

SEQ ID NO: 278 - DNA, 27 bp, Artificial Sequence
  Description of Artificial Sequence: Synthetic oligonucleotide
  modified_base (1)..(2): a, c, t, g, unknown or other
  modified_base (4)..(5): a, c, t, g, unknown or other
  modified_base (10)..(11): a, c, t, g, unknown or other
  modified_base (16)..(17): a, c, t, g, unknown or other
  modified_base (19)..(20): a, c, t, g, unknown or other
  modified_base (22)..(23): a, c, t, g, unknown or other
nnknnkaaannkarannknnknnkctt

SEQ ID NO: 279 - DNA, 30 bp, Artificial Sequence
  Description of Artificial Sequence: Synthetic oligonucleotide
  modified_base (1)..(2): a, c, t, g, unknown or other
  modified_base (4)..(5): a, c, t, g, unknown or other
  modified_base (10)..(11): a, c, t, g, unknown or other
  modified_base (16)..(17): a, c, t, g, unknown or other
  modified_base (19)..(20): a, c, t, g, unknown or other
  modified_base (22)..(23): a, c, t, g, unknown or other
  modified_base (25)..(26): a, c, t, g, unknown or other
nnknnkaaannkarannknnknnknnkctt

SEQ ID NO: 280 - DNA, 33 bp, Artificial Sequence
  Description of Artificial Sequence: Synthetic oligonucleotide
  modified_base (1)..(2): a, c, t, g, unknown or other
  modified_base (4)..(5): a, c, t, g, unknown or other
  modified_base (10)..(11): a, c, t, g, unknown or other
  modified_base (16)..(17): a, c, t, g, unknown or other
  modified_base (19)..(20): a, c, t, g, unknown or other
  modified_base (22)..(23): a, c, t, g, unknown or other
  modified_base (25)..(26): a, c, t, g, unknown or other
  modified_base (28)..(29): a, c, t, g, unknown or other
nnknnkaaannkarannknnknnknnknnkctt

SEQ ID NO: 281 - DNA, 36 bp, Artificial Sequence
  Description of Artificial Sequence: Synthetic oligonucleotide
  modified_base (1)..(2): a, c, t, g, unknown or other
  modified_base (4)..(5): a, c, t, g, unknown or other
  modified_base (10)..(11): a, c, t, g, unknown or other
  modified_base (16)..(17): a, c, t, g, unknown or other
  modified_base (19)..(20): a, c, t, g, unknown or other
  modified_base (22)..(23): a, c, t, g, unknown or other
  modified_base (25)..(26): a, c, t, g, unknown or other
  modified_base (28)..(29): a, c, t, g, unknown or other
  modified_base (31)..(32): a, c, t, g, unknown or other
nnknnkaaannkarannknnknnknnknnknnkctt

SEQ ID NO: 282 - DNA, 24 bp, Artificial Sequence
  Description of Artificial Sequence: Synthetic oligonucleotide
  modified_base (1)..(2): a, c, t, g, unknown or other
  modified_base (7)..(8): a, c, t, g, unknown or other
  modified_base (10)..(11): a, c, t, g, unknown or other
  modified_base (13)..(14): a, c, t, g, unknown or other
  modified_base (16)..(17): a, c, t, g, unknown or other
  modified_base (19)..(20): a, c, t, g, unknown or other
nnkcwannknnknnknnknnktwt

SEQ ID NO: 283 - DNA, 27 bp, Artificial Sequence
  Description of Artificial Sequence: Synthetic oligonucleotide
  modified_base (1)..(2): a, c, t, g, unknown or other
  modified_base (7)..(8): a, c, t, g, unknown or other
  modified_base (10)..(11): a, c, t, g, unknown or other
  modified_base (13)..(14): a, c, t, g, unknown or other
  modified_base (16)..(17): a, c, t, g, unknown or other
  modified_base (19)..(20): a, c, t, g, unknown or other
  modified_base (22)..(23): a, c, t, g, unknown or other
nnkcwannknnknnknnknnknnktwt

SEQ ID NO: 284 - DNA, 30 bp, Artificial Sequence
  Description of Artificial Sequence: Synthetic oligonucleotide
  modified_base (1)..(2): a, c, t, g, unknown or other
  modified_base (7)..(8): a, c, t, g, unknown or other
  modified_base (10)..(11): a, c, t, g, unknown or other
  modified_base (13)..(14): a, c, t, g, unknown or other
  modified_base (16)..(17): a, c, t, g, unknown or other
  modified_base (19)..(20): a, c, t, g, unknown or other
  modified_base (22)..(23): a, c, t, g, unknown or other
  modified_base (25)..(26): a, c, t, g, unknown or other
nnkcwannknnknnknnknnknnknnktwt

SEQ ID NO: 285 - DNA, 33 bp, Artificial Sequence
  Description of Artificial Sequence: Synthetic oligonucleotide
  modified_base (1)..(2): a, c, t, g, unknown or other
  modified_base (7)..(8): a, c, t, g, unknown or other
  modified_base (10)..(11): a, c, t, g, unknown or other
  modified_base (13)..(14): a, c, t, g, unknown or other
  modified_base (16)..(17): a, c, t, g, unknown or other
  modified_base (19)..(20): a, c, t, g, unknown or other
  modified_base (22)..(23): a, c, t, g, unknown or other
  modified_base (25)..(26): a, c, t, g, unknown or other
  modified_base (28)..(29): a, c, t, g, unknown or other
nnkcwannknnknnknnknnknnknnknnktwt

SEQ ID NO: 286 - DNA, 36 bp, Artificial Sequence
  Description of Artificial Sequence: Synthetic oligonucleotide
  modified_base (1)..(2): a, c, t, g, unknown or other
  modified_base (7)..(8): a, c, t, g, unknown or other
  modified_base (10)..(11): a, c, t, g, unknown or other
  modified_base (13)..(14): a, c, t, g, unknown or other
  modified_base (16)..(17): a, c, t, g, unknown or other
  modified_base (19)..(20): a, c, t, g, unknown or other
  modified_base (22)..(23): a, c, t, g, unknown or other
  modified_base (25)..(26): a, c, t, g, unknown or other
  modified_base (28)..(29): a, c, t, g, unknown or other
  modified_base (31)..(32): a, c, t, g, unknown or other
nnkcwannknnknnknnknnknnknnknnknnktwt

SEQ ID NO: 287 - DNA, 24 bp, Artificial Sequence
  Description of Artificial Sequence: Synthetic oligonucleotide
  modified_base (1)..(2): a, c, t, g, unknown or other
  modified_base (7)..(8): a, c, t, g, unknown or other
  modified_base (10)..(11): a, c, t, g, unknown or other
  modified_base (13)..(14): a, c, t, g, unknown or other
  modified_base (16)..(17): a, c, t, g, unknown or other
  modified_base (19)..(20): a, c, t, g, unknown or other
nnkagannknnknnknnknnktwt

SEQ ID NO: 288 - DNA, 27 bp, Artificial Sequence
  Description of Artificial Sequence: Synthetic oligonucleotide
  modified_base (1)..(2): a, c, t, g, unknown or other
  modified_base (7)..(8): a, c, t, g, unknown or other
  modified_base (10)..(11): a, c, t, g, unknown or other
  modified_base (13)..(14): a, c, t, g, unknown or other
  modified_base (16)..(17): a, c, t, g, unknown or other
  modified_base (19)..(20): a, c, t, g, unknown or other
  modified_base (22)..(23): a, c, t, g, unknown or other
nnkagannknnknnknnknnknnktwt

SEQ ID NO: 289 - DNA, 30 bp, Artificial Sequence
  Description of Artificial Sequence: Synthetic oligonucleotide
  modified_base (1)..(2): a, c, t, g, unknown or other
  modified_base (7)..(8): a, c, t, g, unknown or other
  modified_base (10)..(11): a, c, t, g, unknown or other
  modified_base (13)..(14): a, c, t, g, unknown or other
  modified_base (16)..(17): a, c, t, g, unknown or other
  modified_base (19)..(20): a, c, t, g, unknown or other
  modified_base (22)..(23): a, c, t, g, unknown or other
  modified_base (25)..(26): a, c, t, g, unknown or other
nnkagannknnknnknnknnknnknnktwt

SEQ ID NO: 290 - DNA, 33 bp, Artificial Sequence
  Description of Artificial Sequence: Synthetic oligonucleotide
  modified_base (1)..(2): a, c, t, g, unknown or other
  modified_base (7)..(8): a, c, t, g, unknown or other
  modified_base (10)..(11): a, c, t, g, unknown or other
  modified_base (13)..(14): a, c, t, g, unknown or other
  modified_base (16)..(17): a, c, t, g, unknown or other
  modified_base (19)..(20): a, c, t, g, unknown or other
  modified_base (22)..(23): a, c, t, g, unknown or other
  modified_base (25)..(26): a, c, t, g, unknown or other
  modified_base (28)..(29): a, c, t, g, unknown or other
nnkagannknnknnknnknnknnknnknnktwt

SEQ ID NO: 291 - DNA, 36 bp, Artificial Sequence
  Description of Artificial Sequence: Synthetic oligonucleotide
  modified_base (1)..(2): a, c, t, g, unknown or other
  modified_base (7)..(8): a, c, t, g, unknown or other
  modified_base (10)..(11): a, c, t, g, unknown or other
  modified_base (13)..(14): a, c, t, g, unknown or other
  modified_base (16)..(17): a, c, t, g, unknown or other
  modified_base (19)..(20): a, c, t, g, unknown or other
  modified_base (22)..(23): a, c, t, g, unknown or other
  modified_base (25)..(26): a, c, t, g, unknown or other
  modified_base (28)..(29): a, c, t, g, unknown or other
  modified_base (31)..(32): a, c, t, g, unknown or other
nnkagannknnknnknnknnknnknnknnknnktwt

SEQ ID NO: 292 - DNA, 24 bp, Artificial Sequence
  Description of Artificial Sequence: Synthetic oligonucleotide
  modified_base (1)..(2): a, c, t, g, unknown or other
  modified_base (7)..(8): a, c, t, g, unknown or other
  modified_base (10)..(11): a, c, t, g, unknown or other
  modified_base (13)..(14): a, c, t, g, unknown or other
  modified_base (16)..(17): a, c, t, g, unknown or other
  modified_base (19)..(20): a, c, t, g, unknown or other
nnkcctnnknnknnknnknnktwt

SEQ ID NO: 293 - DNA, 27 bp, Artificial Sequence
  Description of Artificial Sequence: Synthetic oligonucleotide
  modified_base (1)..(2): a, c, t, g, unknown or other
  modified_base (7)..(8): a, c, t, g, unknown or other
  modified_base (10)..(11): a, c, t, g, unknown or other
  modified_base (13)..(14): a, c, t, g, unknown or other
  modified_base (16)..(17): a, c, t, g, unknown or other
  modified_base (19)..(20): a, c, t, g, unknown or other
  modified_base (22)..(23): a, c, t, g, unknown or other
nnkcctnnknnknnknnknnknnktwt

SEQ ID NO: 294 - DNA, 30 bp, Artificial Sequence
  Description of Artificial Sequence: Synthetic oligonucleotide
  modified_base (1)..(2): a, c, t, g, unknown or other
  modified_base (7)..(8): a, c, t, g, unknown or other
  modified_base (10)..(11): a, c, t, g, unknown or other
  modified_base (13)..(14): a, c, t, g, unknown or other
  modified_base (16)..(17): a, c, t, g, unknown or other
  modified_base (19)..(20): a, c, t, g, unknown or other
  modified_base (22)..(23): a, c, t, g, unknown or other
  modified_base (25)..(26): a, c, t, g, unknown or other
nnkcctnnknnknnknnknnknnknnktwt

SEQ ID NO: 295 - DNA, 33 bp, Artificial Sequence
  Description of Artificial Sequence: Synthetic oligonucleotide
  modified_base (1)..(2): a, c, t, g, unknown or other
  modified_base (7)..(8): a, c, t, g, unknown or other
  modified_base (10)..(11): a, c, t, g, unknown or other
  modified_base (13)..(14): a, c, t, g, unknown or other
  modified_base (16)..(17): a, c, t, g, unknown or other
  modified_base (19)..(20): a, c, t, g, unknown or other
  modified_base (22)..(23): a, c, t, g, unknown or other
  modified_base (25)..(26): a, c, t, g, unknown or other
  modified_base (28)..(29): a, c, t, g, unknown or other
nnkcctnnknnknnknnknnknnknnknnktwt

SEQ ID NO: 296 - DNA, 36 bp, Artificial Sequence
  Description of Artificial Sequence: Synthetic oligonucleotide
  modified_base (1)..(2): a, c, t, g, unknown or other
  modified_base (7)..(8): a, c, t, g, unknown or other
  modified_base (10)..(11): a, c, t, g, unknown or other
  modified_base (13)..(14): a, c, t, g, unknown or other
  modified_base (16)..(17): a, c, t, g, unknown or other
  modified_base (19)..(20): a, c, t, g, unknown or other
  modified_base (22)..(23): a, c, t, g, unknown or other
  modified_base (25)..(26): a, c, t, g, unknown or other
  modified_base (28)..(29): a, c, t, g, unknown or other
  modified_base (31)..(32): a, c, t, g, unknown or other
nnkcctnnknnknnknnknnknnknnknnknnktwt

SEQ ID NO: 297 - DNA, 24 bp, Artificial Sequence
  Description of Artificial Sequence: Synthetic oligonucleotide
  modified_base (1)..(2): a, c, t, g, unknown or other
  modified_base (7)..(8): a, c, t, g, unknown or other
  modified_base (10)..(11): a, c, t, g, unknown or other
  modified_base (13)..(14): a, c, t, g, unknown or other
  modified_base (16)..(17): a, c, t, g, unknown or other
  modified_base (19)..(20): a, c, t, g, unknown or other
nnkcctnnknnknnknnknnkmtr

SEQ ID NO: 298 - DNA, 27 bp, Artificial Sequence
  Description of Artificial Sequence: Synthetic oligonucleotide
  modified_base (1)..(2): a, c, t, g, unknown or other
  modified_base (7)..(8): a, c, t, g, unknown or other
  modified_base (10)..(11): a, c, t, g, unknown or other
  modified_base (13)..(14): a, c, t, g, unknown or other
  modified_base (16)..(17): a, c, t, g, unknown or other
  modified_base (19)..(20): a, c, t, g, unknown or other
  modified_base (22)..(23): a, c, t, g, unknown or other
nnkcctnnknnknnknnknnknnkmtr

SEQ ID NO: 299 - DNA, 30 bp, Artificial Sequence
  Description of Artificial Sequence: Synthetic oligonucleotide
  modified_base (1)..(2): a, c, t, g, unknown or other
  modified_base (7)..(8): a, c, t, g, unknown or other
  modified_base (10)..(11): a, c, t, g, unknown or other
  modified_base (13)..(14): a, c, t, g, unknown or other
  modified_base (16)..(17): a, c, t, g, unknown or other
  modified_base (19)..(20): a, c, t, g, unknown or other
  modified_base (22)..(23): a, c, t, g, unknown or other
  modified_base (25)..(26): a, c, t, g, unknown or other
nnkcctnnknnknnknnknnknnknnkmtr

SEQ ID NO: 300 - DNA, 33 bp, Artificial Sequence
  Description of Artificial Sequence: Synthetic oligonucleotide
  modified_base (1)..(2): a, c, t, g, unknown or other
  modified_base (7)..(8): a, c, t, g, unknown or other
  modified_base (10)..(11): a, c, t, g, unknown or other
  modified_base (13)..(14): a, c, t, g, unknown or other
  modified_base (16)..(17): a, c, t, g, unknown or other
  modified_base (19)..(20): a, c, t, g, unknown or other
  modified_base (22)..(23): a, c, t, g, unknown or other
  modified_base (25)..(26): a, c, t, g, unknown or other
  modified_base (28)..(29): a, c, t, g, unknown or other
nnkcctnnknnknnknnknnknnknnknnkmtr

SEQ ID NO: 301 - DNA, 36 bp, Artificial Sequence
  Description of Artificial Sequence: Synthetic oligonucleotide
  modified_base (1)..(2): a, c, t, g, unknown or other
  modified_base (7)..(8): a, c, t, g, unknown or other
  modified_base (10)..(11): a, c, t, g, unknown or other
  modified_base (13)..(14): a, c, t, g, unknown or other
  modified_base (16)..(17): a, c, t, g, unknown or other
  modified_base (19)..(20): a, c, t, g, unknown or other
  modified_base (22)..(23): a, c, t, g, unknown or other
  modified_base (25)..(26): a, c, t, g, unknown or other
  modified_base (28)..(29): a, c, t, g, unknown or other
  modified_base (31)..(32): a, c, t, g, unknown or other
nnkcctnnknnknnknnknnknnknnknnknnkmtr

SEQ ID NO: 302 - DNA, 24 bp, Artificial Sequence
  Description of Artificial Sequence: Synthetic oligonucleotide
  modified_base (1)..(2): a, c, t, g, unknown or other
  modified_base (7)..(8): a, c, t, g, unknown or other
  modified_base (10)..(11): a, c, t, g, unknown or other
  modified_base (13)..(14): a, c, t, g, unknown or other
  modified_base (16)..(17): a, c, t, g, unknown or other
  modified_base (19)..(20): a, c, t, g, unknown or other
nnkgaannknnknnknnknnkctt

SEQ ID NO: 303 - DNA, 27 bp, Artificial Sequence
  Description of Artificial Sequence: Synthetic oligonucleotide
  modified_base (1)..(2): a, c, t, g, unknown or other
  modified_base (7)..(8): a, c, t, g, unknown or other
  modified_base (10)..(11): a, c, t, g, unknown or other
  modified_base (13)..(14): a, c, t, g, unknown or other
  modified_base (16)..(17): a, c, t, g, unknown or other
  modified_base (19)..(20): a, c, t, g, unknown or other
  modified_base (22)..(23): a, c, t, g, unknown or other
nnkgaannknnknnknnknnknnkctt

SEQ ID NO: 304 - DNA, 30 bp, Artificial Sequence
  Description of Artificial Sequence: Synthetic oligonucleotide
  modified_base (1)..(2): a, c, t, g, unknown or other
  modified_base (7)..(8): a, c, t, g, unknown or other
  modified_base (10)..(11): a, c, t, g, unknown or other
  modified_base (13)..(14): a, c, t, g, unknown or other
  modified_base (16)..(17): a, c, t, g, unknown or other
  modified_base (19)..(20): a, c, t, g, unknown or other
  modified_base (22)..(23): a, c, t, g, unknown or other
  modified_base (25)..(26): a, c, t, g, unknown or other
nnkgaannknnknnknnknnknnknnkctt

SEQ ID NO: 305 - DNA, 33 bp, Artificial Sequence
  Description of Artificial Sequence: Synthetic oligonucleotide
  modified_base (1)..(2): a, c, t, g, unknown or other
  modified_base (7)..(8): a, c, t, g, unknown or other
  modified_base (10)..(11): a, c, t, g, unknown or other
  modified_base (13)..(14): a, c, t, g, unknown or other
  modified_base (16)..(17): a, c, t, g, unknown or other
  modified_base (19)..(20): a, c, t, g, unknown or other
  modified_base (22)..(23): a, c, t, g, unknown or other
  modified_base (25)..(26): a, c, t, g, unknown or other
  modified_base (28)..(29): a, c, t, g, unknown or other
nnkgaannknnknnknnknnknnknnknnkctt

SEQ ID NO: 306 - DNA, 36 bp, Artificial Sequence
  Description of Artificial Sequence: Synthetic oligonucleotide
  modified_base (1)..(2): a, c, t, g, unknown or other
  modified_base (7)..(8): a, c, t, g, unknown or other
  modified_base (10)..(11): a, c, t, g, unknown or other
  modified_base (13)..(14): a, c, t, g, unknown or other
  modified_base (16)..(17): a, c, t, g, unknown or other
  modified_base (19)..(20): a, c, t, g, unknown or other
  modified_base (22)..(23): a, c, t, g, unknown or other
  modified_base (25)..(26): a, c, t, g, unknown or other
  modified_base (28)..(29): a, c, t, g, unknown or other
  modified_base (31)..(32): a, c, t, g, unknown or other
nnkgaannknnknnknnknnknnknnknnknnkctt

SEQ ID NO: 307 - DNA, 24 bp, Artificial Sequence
  Description of Artificial Sequence: Synthetic oligonucleotide
  modified_base (1)..(2): a, c, t, g, unknown or other
  modified_base (7)..(8): a, c, t, g, unknown or other
  modified_base (10)..(11): a, c, t, g, unknown or other
  modified_base (13)..(14): a, c, t, g, unknown or other
  modified_base (16)..(17): a, c, t, g, unknown or other
  modified_base (19)..(20): a, c, t, g, unknown or other
nnkgstnnknnknnknnknnkrtt

SEQ ID NO: 308 - DNA, 27 bp, Artificial Sequence
  Description of Artificial Sequence: Synthetic oligonucleotide
  modified_base (1)..(2): a, c, t, g, unknown or other
  modified_base (7)..(8): a, c, t, g, unknown or other
  modified_base (10)..(11): a, c, t, g, unknown or other
  modified_base (13)..(14): a, c, t, g, unknown or other
  modified_base (16)..(17): a, c, t, g, unknown or other
  modified_base (19)..(20): a, c, t, g, unknown or other
  modified_base (22)..(23): a, c, t, g, unknown or other
nnkgstnnknnknnknnknnknnkrtt

SEQ ID NO: 309 - DNA, 30 bp, Artificial Sequence
  Description of Artificial Sequence: Synthetic oligonucleotide
  modified_base (1)..(2): a, c, t, g, unknown or other
  modified_base (7)..(8): a, c, t, g, unknown or other
  modified_base (10)..(11): a, c, t, g, unknown or other
  modified_base (13)..(14): a, c, t, g, unknown or other
  modified_base (16)..(17): a, c, t, g, unknown or other
  modified_base (19)..(20): a, c, t, g, unknown or other
  modified_base (22)..(23): a, c, t, g, unknown or other
  modified_base (25)..(26): a, c, t, g, unknown or other
nnkgstnnknnknnknnknnknnknnkrtt

SEQ ID NO: 310 - DNA, 33 bp, Artificial Sequence
  Description of Artificial Sequence: Synthetic oligonucleotide
  modified_base (1)..(2): a, c, t, g, unknown or other
  modified_base (7)..(8): a, c, t, g, unknown or other
  modified_base (10)..(11): a, c, t, g, unknown or other
  modified_base (13)..(14): a, c, t, g, unknown or other
  modified_base (16)..(17): a, c, t, g, unknown or other
  modified_base (19)..(20): a, c, t, g, unknown or other
  modified_base (22)..(23): a, c, t, g, unknown or other
  modified_base (25)..(26): a, c, t, g, unknown or other
  modified_base (28)..(29): a, c, t, g, unknown or other
nnkgstnnknnknnknnknnknnknnknnkrtt

SEQ ID NO: 311 - DNA, 36 bp, Artificial Sequence
  Description of Artificial Sequence: Synthetic oligonucleotide
  modified_base (1)..(2): a, c, t, g, unknown or other
  modified_base (7)..(8): a, c, t, g, unknown or other
  modified_base (10)..(11): a, c, t, g, unknown or other
  modified_base (13)..(14): a, c, t, g, unknown or other
  modified_base (16)..(17): a, c, t, g, unknown or other
  modified_base (19)..(20): a, c, t, g, unknown or other
  modified_base (22)..(23): a, c, t, g, unknown or other
  modified_base (25)..(26): a, c, t, g, unknown or other
  modified_base (28)..(29): a, c, t, g, unknown or other
  modified_base (31)..(32): a, c, t, g, unknown or other
nnkgstnnknnknnknnknnknnknnknnknnkrtt

SEQ ID NO: 312 - DNA, 24 bp, Artificial Sequence
  Description of Artificial Sequence: Synthetic oligonucleotide
  modified_base (1)..(2): a, c, t, g, unknown or other
  modified_base (7)..(8): a, c, t, g, unknown or other
  modified_base (10)..(11): a, c, t, g, unknown or other
  modified_base (13)..(14): a, c, t, g, unknown or other
  modified_base (16)..(17): a, c, t, g, unknown or other
  modified_base (19)..(20): a, c, t, g, unknown or other
nnkcctnnknnknnknnknnkrtt

SEQ ID NO: 313 - DNA, 27 bp, Artificial Sequence
  Description of Artificial Sequence: Synthetic oligonucleotide
  modified_base (1)..(2): a, c, t, g, unknown or other
  modified_base (7)..(8): a, c, t, g, unknown or other
  modified_base (10)..(11): a, c, t, g, unknown or other
  modified_base (13)..(14): a, c, t, g, unknown or other
  modified_base (16)..(17): a, c, t, g, unknown or other
  modified_base (19)..(20): a, c, t, g, unknown or other
  modified_base (22)..(23): a, c, t, g, unknown or other
nnkcctnnknnknnknnknnknnkrtt

SEQ ID NO: 314 - DNA, 30 bp, Artificial Sequence
  Description of Artificial Sequence: Synthetic oligonucleotide
  modified_base (1)..(2): a, c, t, g, unknown or other
  modified_base (7)..(8): a, c, t, g, unknown or other
  modified_base (10)..(11): a, c, t, g, unknown or other
  modified_base (13)..(14): a, c, t, g, unknown or other
  modified_base (16)..(17): a, c, t, g, unknown or other
  modified_base (19)..(20): a, c, t, g, unknown or other
  modified_base (22)..(23): a, c, t, g, unknown or other
  modified_base (25)..(26): a, c, t, g, unknown or other
nnkcctnnknnknnknnknnknnknnkrtt

SEQ ID NO: 315 - DNA, 33 bp, Artificial Sequence
  Description of Artificial Sequence: Synthetic oligonucleotide
  modified_base (1)..(2): a, c, t, g, unknown or other
  modified_base (7)..(8): a, c, t, g, unknown or other
  modified_base (10)..(11): a, c, t, g, unknown or other
  modified_base (13)..(14): a, c, t, g, unknown or other
  modified_base (16)..(17): a, c, t, g, unknown or other
  modified_base (19)..(20): a, c, t, g, unknown or other
  modified_base (22)..(23): a, c, t, g, unknown or other
  modified_base (25)..(26): a, c, t, g, unknown or other
  modified_base (28)..(29): a, c, t, g, unknown or other
nnkcctnnknnknnknnknnknnknnknnkrtt

SEQ ID NO: 316 - DNA, 36 bp, Artificial Sequence
  Description of Artificial Sequence: Synthetic oligonucleotide
  modified_base (1)..(2): a, c, t, g, unknown or other
  modified_base (7)..(8): a, c, t, g, unknown or other
  modified_base (10)..(11): a, c, t, g, unknown or other
  modified_base (13)..(14): a, c, t, g, unknown or other
  modified_base (16)..(17): a, c, t, g, unknown or other
  modified_base (19)..(20): a, c, t, g, unknown or other
  modified_base (22)..(23): a, c, t, g, unknown or other
  modified_base (25)..(26): a, c, t, g, unknown or other
  modified_base (28)..(29): a, c, t, g, unknown or other
  modified_base (31)..(32): a, c, t, g, unknown or other
nnkcctnnknnknnknnknnknnknnknnknnkrtt

SEQ ID NO: 317 - DNA, 24 bp, Artificial Sequence
  Description of Artificial Sequence: Synthetic oligonucleotide
  modified_base (1)..(2): a, c, t, g, unknown or other
  modified_base (7)..(8): a, c, t, g, unknown or other
  modified_base (10)..(11): a, c, t, g, unknown or other
  modified_base (13)..(14): a, c, t, g, unknown or other
  modified_base (16)..(17): a, c, t, g, unknown or other
  modified_base (19)..(20): a, c, t, g, unknown or other
nnkgaannknnknnknnknnktwt

SEQ ID NO: 318 - DNA, 27 bp, Artificial Sequence
  Description of Artificial Sequence: Synthetic oligonucleotide
  modified_base (1)..(2): a, c, t, g, unknown or other
  modified_base (7)..(8): a, c, t, g, unknown or other
  modified_base (10)..(11): a, c, t, g, unknown or other
  modified_base (13)..(14): a, c, t, g, unknown or other
  modified_base (16)..(17): a, c, t, g, unknown or other
  modified_base (19)..(20): a, c, t, g, unknown or other
  modified_base (22)..(23): a, c, t, g, unknown or other
nnkgaannknnknnknnknnknnktwt

SEQ ID NO: 319 - DNA, 30 bp, Artificial Sequence
  Description of Artificial Sequence: Synthetic oligonucleotide
  modified_base (1)..(2): a, c, t, g, unknown or other
  modified_base (7)..(8): a, c, t, g, unknown or other
  modified_base (10)..(11): a, c, t, g, unknown or other
  modified_base (13)..(14): a, c, t, g, unknown or other
  modified_base (16)..(17): a, c, t, g, unknown or other
  modified_base (19)..(20): a, c, t, g, unknown or other
  modified_base (22)..(23): a, c, t, g, unknown or other
  modified_base (25)..(26): a, c, t, g, unknown or other
nnkgaannknnknnknnknnknnknnktwt

SEQ ID NO: 320 - DNA, 33 bp, Artificial Sequence
  Description of Artificial Sequence: Synthetic oligonucleotide
  modified_base (1)..(2): a, c, t, g, unknown or other
  modified_base (7)..(8): a, c, t, g, unknown or other
  modified_base (10)..(11): a, c, t, g, unknown or other
  modified_base (13)..(14): a, c, t, g, unknown or other
  modified_base (16)..(17): a, c, t, g, unknown or other
  modified_base (19)..(20): a, c, t, g, unknown or other
  modified_base (22)..(23): a, c, t, g, unknown or other
  modified_base (25)..(26): a, c, t, g, unknown or other
  modified_base (28)..(29): a, c, t, g, unknown or other
nnkgaannknnknnknnknnknnknnknnktwt

SEQ ID NO: 321 - DNA, 36 bp, Artificial Sequence
  Description of Artificial Sequence: Synthetic oligonucleotide
  modified_base (1)..(2): a, c, t, g, unknown or other
  modified_base (7)..(8): a, c, t, g, unknown or other
  modified_base (10)..(11): a, c, t, g, unknown or other
  modified_base (13)..(14): a, c, t, g, unknown or other
  modified_base (16)..(17): a, c, t, g, unknown or other
  modified_base (19)..(20): a, c, t, g, unknown or other
  modified_base (22)..(23): a, c, t, g, unknown or other
  modified_base (25)..(26): a, c, t, g, unknown or other
  modified_base (28)..(29): a, c, t, g, unknown or other
  modified_base (31)..(32): a, c, t, g, unknown or other
nnkgaannknnknnknnknnknnknnknnknnktwt

SEQ ID NO: 322 - DNA, 24 bp, Artificial Sequence
  Description of Artificial Sequence: Synthetic oligonucleotide
  modified_base (1)..(2): a, c, t, g, unknown or other
  modified_base (7)..(8): a, c, t, g, unknown or other
  modified_base (10)..(11): a, c, t, g, unknown or other
  modified_base (13)..(14): a, c, t, g, unknown or other
  modified_base (16)..(17): a, c, t, g, unknown or other
  modified_base (19)..(20): a, c, t, g, unknown or other
nnkcctnnknnknnknnknnktgg

SEQ ID NO: 323 - DNA, 27 bp, Artificial Sequence
  Description of Artificial Sequence: Synthetic oligonucleotide
  modified_base (1)..(2): a, c, t, g, unknown or other
  modified_base (7)..(8): a, c, t, g, unknown or other
  modified_base (10)..(11): a, c, t, g, unknown or other
  modified_base (13)..(14): a, c, t, g, unknown or other
  modified_base (16)..(17): a, c, t, g, unknown or other
  modified_base (19)..(20): a, c, t, g, unknown or other
  modified_base (22)..(23): a, c, t, g, unknown or other
nnkcctnnknnknnknnknnknnktgg

SEQ ID NO: 324 - DNA, 30 bp, Artificial Sequence
  Description of Artificial Sequence: Synthetic oligonucleotide
  modified_base (1)..(2): a, c, t, g, unknown or other
  modified_base (7)..(8): a, c, t, g, unknown or other
  modified_base (10)..(11): a, c, t, g, unknown or other
  modified_base (13)..(14): a, c, t, g, unknown or other
  modified_base (16)..(17): a, c, t, g, unknown or other
  modified_base (19)..(20): a, c, t, g, unknown or other
  modified_base (22)..(23): a, c, t, g, unknown or other
  modified_base (25)..(26): a, c, t, g, unknown or other
nnkcctnnknnknnknnknnknnknnktgg

SEQ ID NO: 325 - DNA, 33 bp, Artificial Sequence
  Description of Artificial Sequence: Synthetic oligonucleotide
  modified_base (1)..(2): a, c, t, g, unknown or other
  modified_base (7)..(8): a, c, t, g, unknown or other
  modified_base (10)..(11): a, c, t, g, unknown or other
  modified_base (13)..(14): a, c, t, g, unknown or other
  modified_base (16)..(17): a, c, t, g, unknown or other
  modified_base (19)..(20): a, c, t, g, unknown or other
  modified_base (22)..(23): a, c, t, g, unknown or other
  modified_base (25)..(26): a, c, t, g, unknown or other
  modified_base (28)..(29): a, c, t, g, unknown or other
nnkcctnnknnknnknnknnknnknnknnktgg

SEQ ID NO: 326 - DNA, 36 bp, Artificial Sequence
  Description of Artificial Sequence: Synthetic oligonucleotide
  modified_base (1)..(2): a, c, t, g, unknown or other
  modified_base (7)..(8): a, c, t, g, unknown or other
  modified_base (10)..(11): a, c, t, g, unknown or other
  modified_base (13)..(14): a, c, t, g, unknown or other
  modified_base (16)..(17): a, c, t, g, unknown or other
  modified_base (19)..(20): a, c, t, g, unknown or other
  modified_base (22)..(23): a, c, t, g, unknown or other
  modified_base (25)..(26): a, c, t, g, unknown or other
  modified_base (28)..(29): a, c, t, g, unknown or other
  modified_base (31)..(32): a, c, t, g, unknown or other
nnkcctnnknnknnknnknnknnknnknnknnktgg

SEQ ID NO: 327 - DNA, 24 bp, Artificial Sequence
  Description of Artificial Sequence: Synthetic oligonucleotide
  modified_base (1)..(2): a, c, t, g, unknown or other
  modified_base (7)..(8): a, c, t, g, unknown or other
  modified_base (10)..(11): a, c, t, g, unknown or other
  modified_base (13)..(14): a, c, t, g, unknown or other
  modified_base (16)..(17): a, c, t, g, unknown or other
  modified_base (19)..(20): a, c, t, g, unknown or other
nnkcctnnknnknnknnknnkytt

SEQ ID NO: 328 - DNA, 27 bp, Artificial Sequence
  Description of Artificial Sequence: Synthetic oligonucleotide
  modified_base (1)..(2): a, c, t, g, unknown or other
  modified_base (7)..(8): a, c, t, g, unknown or other
  modified_base (10)..(11): a, c, t, g, unknown or other
  modified_base (13)..(14): a, c, t, g, unknown or other
  modified_base (16)..(17): a, c, t, g, unknown or other
  modified_base (19)..(20): a, c, t, g, unknown or other
  modified_base (22)..(23): a, c, t, g, unknown or other
nnkcctnnknnknnknnknnknnkytt

SEQ ID NO: 329 - DNA, 30 bp, Artificial Sequence
  Description of Artificial Sequence: Synthetic oligonucleotide
  modified_base (1)..(2): a, c, t, g, unknown or other
  modified_base (7)..(8): a, c, t, g, unknown or other
  modified_base (10)..(11): a, c, t, g, unknown or other
  modified_base (13)..(14): a, c, t, g, unknown or other
  modified_base (16)..(17): a, c, t, g, unknown or other
  modified_base (19)..(20): a, c, t, g, unknown or other
  modified_base (22)..(23): a, c, t, g, unknown or other
  modified_base (25)..(26): a, c, t, g, unknown or other
nnkcctnnknnknnknnknnknnknnkytt

SEQ ID NO: 330 - DNA, 33 bp, Artificial Sequence
  Description of Artificial Sequence: Synthetic oligonucleotide
  modified_base (1)..(2): a, c, t, g, unknown or other
  modified_base (7)..(8): a, c, t, g, unknown or other
  modified_base (10)..(11): a, c, t, g, unknown or other
  modified_base (13)..(14): a, c, t, g, unknown or other
  modified_base (16)..(17): a, c, t, g, unknown or other
  modified_base (19)..(20): a, c, t, g, unknown or other
  modified_base (22)..(23): a, c, t, g, unknown or other
  modified_base (25)..(26): a, c, t, g, unknown or other
  modified_base (28)..(29): a, c, t, g, unknown or other
nnkcctnnknnknnknnknnknnknnknnkytt

SEQ ID NO: 331 - DNA, 36 bp, Artificial Sequence
  Description of Artificial Sequence: Synthetic oligonucleotide
  modified_base (1)..(2): a, c, t, g, unknown or other
  modified_base (7)..(8): a, c, t, g, unknown or other
  modified_base (10)..(11): a, c, t, g, unknown or other
  modified_base (13)..(14): a, c, t, g, unknown or other
  modified_base (16)..(17): a, c, t, g, unknown or other
  modified_base (19)..(20): a, c, t, g, unknown or other
  modified_base (22)..(23): a, c, t, g, unknown or other
  modified_base (25)..(26): a, c, t, g, unknown or other
  modified_base (28)..(29): a, c, t, g, unknown or other
  modified_base (31)..(32): a, c, t, g, unknown or other
nnkcctnnknnknnknnknnknnknnknnknnkytt

SEQ ID NO: 332 - DNA, 24 bp, Artificial Sequence
  Description of Artificial Sequence: Synthetic oligonucleotide
  modified_base (1)..(2): a, c, t, g, unknown or other
  modified_base (7)..(8): a, c, t, g, unknown or other
  modified_base (10)..(11): a, c, t, g, unknown or other
  modified_base (13)..(14): a, c, t, g, unknown or other
  modified_base (16)..(17): a, c, t, g, unknown or other
  modified_base (19)..(20): a, c, t, g, unknown or other
nnkdctnnknnknnknnknnktwt

SEQ ID NO: 333 - DNA, 27 bp, Artificial Sequence
  Description of Artificial Sequence: Synthetic oligonucleotide
  modified_base (1)..(2): a, c, t, g, unknown or other
  modified_base (7)..(8): a, c, t, g, unknown or other
  modified_base (10)..(11): a, c, t, g, unknown or other
  modified_base (13)..(14): a, c, t, g, unknown or other
  modified_base (16)..(17): a, c, t, g, unknown or other
  modified_base (19)..(20): a, c, t, g, unknown or other
  modified_base (22)..(23): a, c, t, g, unknown or other
nnkdctnnknnknnknnknnknnktwt

SEQ ID NO: 334 - DNA, 30 bp, Artificial Sequence
  Description of Artificial Sequence: Synthetic oligonucleotide
  modified_base (1)..(2): a, c, t, g, unknown or other
  modified_base (7)..(8): a, c, t, g, unknown or other
  modified_base (10)..(11): a, c, t, g, unknown or other
  modified_base (13)..(14): a, c, t, g, unknown or other
  modified_base (16)..(17): a, c, t, g, unknown or other
  modified_base (19)..(20): a, c, t, g, unknown or other
  modified_base (22)..(23): a, c, t, g, unknown or other
  modified_base (25)..(26): a, c, t, g, unknown or other
nnkdctnnknnknnknnknnknnknnktwt

SEQ ID NO: 335 - DNA, 33 bp, Artificial Sequence
  Description of Artificial Sequence: Synthetic oligonucleotide
  modified_base (1)..(2): a, c, t, g, unknown or other
  modified_base (7)..(8): a, c, t, g, unknown or other
  modified_base (10)..(11): a, c, t, g, unknown or other
  modified_base (13)..(14): a, c, t, g, unknown or other
  modified_base (16)..(17): a, c, t, g, unknown or other
  modified_base (19)..(20): a, c, t, g, unknown or other
  modified_base (22)..(23): a, c, t, g, unknown or other
  modified_base (25)..(26): a, c, t, g, unknown or other
  modified_base (28)..(29): a, c, t, g, unknown or other
nnkdctnnknnknnknnknnknnknnknnktwt

SEQ ID NO: 336 - DNA, 36 bp, Artificial Sequence
  Description of Artificial Sequence: Synthetic oligonucleotide
  modified_base (1)..(2): a, c, t, g, unknown or other
  modified_base (7)..(8): a, c, t, g, unknown or other
  modified_base (10)..(11): a, c, t, g, unknown or other
  modified_base (13)..(14): a, c, t, g, unknown or other
  modified_base (16)..(17): a, c, t, g, unknown or other
  modified_base (19)..(20): a, c, t, g, unknown or other
  modified_base (22)..(23): a, c, t, g, unknown or other
  modified_base (25)..(26): a, c, t, g, unknown or other
  modified_base (28)..(29): a, c, t, g, unknown or other
  modified_base (31)..(32): a, c, t, g, unknown or other
nnkdctnnknnknnknnknnknnknnknnknnktwt

SEQ ID NO: 337 - DNA, 24 bp, Artificial Sequence
  Description of Artificial Sequence: Synthetic oligonucleotide
  modified_base (1)..(2): a, c, t, g, unknown or other
  modified_base (7)..(8): a, c, t, g, unknown or other
  modified_base (10)..(11): a, c, t, g, unknown or other
  modified_base (13)..(14): a, c, t, g, unknown or other
  modified_base (16)..(17): a, c, t, g, unknown or other
  modified_base (19)..(20): a, c, t, g, unknown or other
nnkdctnnknnknnknnknnktgg

SEQ ID NO: 338 - DNA, 27 bp, Artificial Sequence
  Description of Artificial Sequence: Synthetic oligonucleotide
  modified_base (1)..(2): a, c, t, g, unknown or other
  modified_base (7)..(8): a, c, t, g, unknown or other
  modified_base (10)..(11): a, c, t, g, unknown or other
  modified_base (13)..(14): a, c, t, g, unknown or other
  modified_base (16)..(17): a, c, t, g, unknown or other
  modified_base (19)..(20): a, c, t, g, unknown or other
  modified_base (22)..(23): a, c, t, g, unknown or other
nnkdctnnknnknnknnknnknnktgg

SEQ ID NO: 339 - DNA, 30 bp, Artificial Sequence
  Description of Artificial Sequence: Synthetic oligonucleotide
  modified_base (1)..(2): a, c, t, g, unknown or other
  modified_base (7)..(8): a, c, t, g, unknown or other
  modified_base (10)..(11): a, c, t, g, unknown or other
  modified_base (13)..(14): a, c, t, g, unknown or other
  modified_base (16)..(17): a, c, t, g, unknown or other
  modified_base (19)..(20): a, c, t, g, unknown or other
  modified_base (22)..(23): a, c, t, g, unknown or other
  modified_base (25)..(26): a, c, t, g, unknown or other
nnkdctnnknnknnknnknnknnknnktgg

SEQ ID NO: 340 - DNA, 33 bp, Artificial Sequence
  Description of Artificial Sequence: Synthetic oligonucleotide
  modified_base (1)..(2): a, c, t, g, unknown or other
  modified_base (7)..(8): a, c, t, g, unknown or other
  modified_base (10)..(11): a, c, t, g, unknown or other
  modified_base (13)..(14): a, c, t, g, unknown or other
  modified_base (16)..(17): a, c, t, g, unknown or other
  modified_base (19)..(20): a, c, t, g, unknown or other
  modified_base (22)..(23): a, c, t, g, unknown or other
  modified_base (25)..(26): a, c, t, g, unknown or other
  modified_base (28)..(29): a, c, t, g, unknown or other
nnkdctnnknnknnknnknnknnknnknnktgg

SEQ ID NO: 341 - DNA, 36 bp, Artificial Sequence
  Description of Artificial Sequence: Synthetic oligonucleotide
  modified_base (1)..(2): a, c, t, g, unknown or other
  modified_base (7)..(8): a, c, t, g, unknown or other
  modified_base (10)..(11): a, c, t, g, unknown or other
  modified_base (13)..(14): a, c, t, g, unknown or other
  modified_base (16)..(17): a, c, t, g, unknown or other
  modified_base (19)..(20): a, c, t, g, unknown or other
  modified_base (22)..(23): a, c, t, g, unknown or other
  modified_base (25)..(26): a, c, t, g, unknown or other
  modified_base (28)..(29): a, c, t, g, unknown or other
  modified_base (31)..(32): a, c, t, g, unknown or other
nnkdctnnknnknnknnknnknnknnknnknnktgg

SEQ ID NO: 342 - DNA, 24 bp, Artificial Sequence
  Description of Artificial Sequence: Synthetic oligonucleotide
  modified_base (1)..(2): a, c, t, g, unknown or other
  modified_base (7)..(8): a, c, t, g, unknown or other
  modified_base (10)..(11): a, c, t, g, unknown or other
  modified_base (13)..(14): a, c, t, g, unknown or other
  modified_base (16)..(17): a, c, t, g, unknown or other
  modified_base (19)..(20): a, c, t, g, unknown or other
nnkttannknnknnknnknnktta

SEQ ID NO: 343 - DNA, 27 bp, Artificial Sequence
  Description of Artificial Sequence: Synthetic oligonucleotide
  modified_base (1)..(2): a, c, t, g, unknown or other
  modified_base (7)..(8): a, c, t, g, unknown or other
  modified_base (10)..(11): a, c, t, g, unknown or other
  modified_base (13)..(14): a, c, t, g, unknown or other
  modified_base (16)..(17): a, c, t, g, unknown or other
  modified_base (19)..(20): a, c, t, g, unknown or other
  modified_base (22)..(23): a, c, t, g, unknown or other
nnkttannknnknnknnknnknnktta

SEQ ID NO: 344 - DNA, 30 bp, Artificial Sequence
  Description of Artificial Sequence: Synthetic oligonucleotide
  modified_base (1)..(2): a, c, t, g, unknown or other
  modified_base (7)..(8): a, c, t, g, unknown or other
  modified_base (10)..(11): a, c, t, g, unknown or other
  modified_base (13)..(14): a, c, t, g, unknown or other
  modified_base (16)..(17): a, c, t, g, unknown or other
  modified_base (19)..(20): a, c, t, g, unknown or other
  modified_base (22)..(23): a, c, t, g, unknown or other
  modified_base (25)..(26): a, c, t, g, unknown or other
nnkttannknnknnknnknnknnknnktta

SEQ ID NO: 345 - DNA, 33 bp, Artificial Sequence
  Description of Artificial Sequence: Synthetic oligonucleotide
  modified_base (1)..(2): a, c, t, g, unknown or other
  modified_base (7)..(8): a, c, t, g, unknown or other
  modified_base (10)..(11): a, c, t, g, unknown or other
  modified_base (13)..(14): a, c, t, g, unknown or other
  modified_base (16)..(17): a, c, t, g, unknown or other
  modified_base (19)..(20): a, c, t, g, unknown or other
  modified_base (22)..(23): a, c, t, g, unknown or other
  modified_base (25)..(26): a, c, t, g, unknown or other
  modified_base (28)..(29): a, c, t, g, unknown or other
nnkttannknnknnknnknnknnknnknnktta

SEQ ID NO: 346 - DNA, 36 bp, Artificial Sequence
  Description of Artificial Sequence: Synthetic oligonucleotide
  modified_base (1)..(2): a, c, t, g, unknown or other
  modified_base (7)..(8): a, c, t, g, unknown or other
  modified_base (10)..(11): a, c, t, g, unknown or other
  modified_base (13)..(14): a, c, t, g, unknown or other
  modified_base (16)..(17): a, c, t, g, unknown or other
  modified_base (19)..(20): a, c, t, g, unknown or other
  modified_base (22)..(23): a, c, t, g, unknown or other
  modified_base (25)..(26): a, c, t, g, unknown or other
  modified_base (28)..(29): a, c, t, g, unknown or other
  modified_base (31)..(32): a, c, t, g, unknown or other
nnkttannknnknnknnknnknnknnknnknnktta

SEQ ID NO: 347 - DNA, 24 bp, Artificial Sequence
  Description of Artificial Sequence: Synthetic oligonucleotide
  modified_base (1)..(2): a, c, t, g, unknown or other
  modified_base (7)..(8): a, c, t, g, unknown or other
  modified_base (10)..(11): a, c, t, g, unknown or other
  modified_base (13)..(14): a, c, t, g, unknown or other
  modified_base (16)..(17): a, c, t, g, unknown or other
  modified_base (19)..(20): a, c, t, g, unknown or other
nnkgctnnknnknnknnknnktta

SEQ ID NO: 348 - DNA, 27 bp, Artificial Sequence
  Description of Artificial Sequence: Synthetic oligonucleotide
  modified_base (1)..(2): a, c, t, g, unknown or other
  modified_base (7)..(8): a, c, t, g, unknown or other
  modified_base (10)..(11): a, c, t, g, unknown or other
  modified_base (13)..(14): a, c, t, g, unknown or other
  modified_base (16)..(17): a, c, t, g, unknown or other
  modified_base (19)..(20): a, c, t, g, unknown or other
  modified_base (22)..(23): a, c, t, g, unknown or other
nnkgctnnknnknnknnknnknnktta

SEQ ID NO: 349 - DNA, 30 bp, Artificial Sequence
  Description of Artificial Sequence: Synthetic oligonucleotide
  modified_base (1)..(2): a, c, t, g, unknown or other
  modified_base (7)..(8): a, c, t, g, unknown or other
  modified_base (10)..(11): a, c, t, g, unknown or other
  modified_base (13)..(14): a, c, t, g, unknown or other
  modified_base (16)..(17): a, c, t, g, unknown or other
  modified_base (19)..(20): a, c, t, g, unknown or other
  modified_base (22)..(23): a, c, t, g, unknown or other
  modified_base (25)..(26): a, c, t, g, unknown or other
nnkgctnnknnknnknnknnknnknnktta

SEQ ID NO: 350 - DNA, 33 bp, Artificial Sequence
  Description of Artificial Sequence: Synthetic oligonucleotide
  modified_base (1)..(2): a, c, t, g, unknown or other
  modified_base (7)..(8): a, c, t, g, unknown or other
  modified_base (10)..(11): a, c, t, g, unknown or other
  modified_base (13)..(14): a, c, t, g, unknown or other
  modified_base (16)..(17): a, c, t, g, unknown or other
  modified_base (19)..(20): a, c, t, g, unknown or other
  modified_base (22)..(23): a, c, t, g, unknown or other
  modified_base (25)..(26): a, c, t, g, unknown or other
  modified_base (28)..(29): a, c, t, g, unknown or other
nnkgctnnknnknnknnknnknnknnknnktta

SEQ ID NO: 351 - DNA, 36 bp, Artificial Sequence
  Description of Artificial Sequence: Synthetic oligonucleotide
  modified_base (1)..(2): a, c, t, g, unknown or other
  modified_base (7)..(8): a, c, t, g, unknown or other
  modified_base (10)..(11): a, c, t, g, unknown or other
  modified_base (13)..(14): a, c, t, g, unknown or other
  modified_base (16)..(17): a, c, t, g, unknown or other
  modified_base (19)..(20): a, c, t, g, unknown or other
  modified_base (22)..(23): a, c, t, g, unknown or other
  modified_base (25)..(26): a, c, t, g, unknown or other
  modified_base (28)..(29): a, c, t, g, unknown or other
  modified_base (31)..(32): a, c, t, g, unknown or other
nnkgctnnknnknnknnknnknnknnknnknnktta

SEQ ID NO: 352 - DNA, 24 bp, Artificial Sequence
  Description of Artificial Sequence: Synthetic oligonucleotide
  modified_base (1)..(2): a, c, t, g, unknown or other
  modified_base (7)..(8): a, c, t, g, unknown or other
  modified_base (10)..(11): a, c, t, g, unknown or other
  modified_base (13)..(14): a, c, t, g, unknown or other
  modified_base (16)..(17): a, c, t, g, unknown or other
  modified_base (19)..(20): a, c, t, g, unknown or other
nnkgctnnknnknnknnknnkstc

SEQ ID NO: 353 - DNA, 27 bp, Artificial Sequence
  Description of Artificial Sequence: Synthetic oligonucleotide
  modified_base (1)..(2): a, c, t, g, unknown or other
  modified_base (7)..(8): a, c, t, g, unknown or other
  modified_base (10)..(11): a, c, t, g, unknown or other
  modified_base (13)..(14): a, c, t, g, unknown or other
  modified_base (16)..(17): a, c, t, g, unknown or other
  modified_base (19)..(20): a, c, t, g, unknown or other
  modified_base (22)..(23): a, c, t, g, unknown or other
nnkgctnnknnknnknnknnknnkstc

SEQ ID NO: 354 - DNA, 30 bp, Artificial Sequence
  Description of Artificial Sequence: Synthetic oligonucleotide
  modified_base (1)..(2): a, c, t, g, unknown or other
  modified_base (7)..(8): a, c, t, g, unknown or other
  modified_base (10)..(11): a, c, t, g, unknown or other
  modified_base (13)..(14): a, c, t, g, unknown or other
  modified_base (16)..(17): a, c, t, g, unknown or other
  modified_base (19)..(20): a, c, t, g, unknown or other
  modified_base (22)..(23): a, c, t, g, unknown or other
  modified_base (25)..(26): a, c, t, g, unknown or other
nnkgctnnknnknnknnknnknnknnkstc

SEQ ID NO: 355 - DNA, 33 bp, Artificial Sequence
  Description of Artificial Sequence: Synthetic oligonucleotide
  modified_base (1)..(2): a, c, t, g, unknown or other
  modified_base (7)..(8): a, c, t, g, unknown or other
  modified_base (10)..(11): a, c, t, g, unknown or other
  modified_base (13)..(14): a, c, t, g, unknown or other
  modified_base (16)..(17): a, c, t, g, unknown or other
  modified_base (19)..(20): a, c, t, g, unknown or other
  modified_base (22)..(23): a, c, t, g, unknown or other
  modified_base (25)..(26): a, c, t, g, unknown or other
  modified_base (28)..(29): a, c, t, g, unknown or other
nnkgctnnknnknnknnknnknnknnknnkstc

SEQ ID NO: 356 - DNA, 36 bp, Artificial Sequence
  Description of Artificial Sequence: Synthetic oligonucleotide
  modified_base (1)..(2): a, c, t, g, unknown or other
  modified_base (7)..(8): a, c, t, g, unknown or other
  modified_base (10)..(11): a, c, t, g, unknown or other
  modified_base (13)..(14): a, c, t, g, unknown or other
  modified_base (16)..(17): a, c, t, g, unknown or other
  modified_base (19)..(20): a, c, t, g, unknown or other
  modified_base (22)..(23): a, c, t, g, unknown or other
  modified_base (25)..(26): a, c, t, g, unknown or other
  modified_base (28)..(29): a, c, t, g, unknown or other
  modified_base (31)..(32): a, c, t, g, unknown or other
nnkgctnnknnknnknnknnknnknnknnknnkstc

SEQ ID NO: 357 - DNA, 24 bp, Artificial Sequence
  Description of Artificial Sequence: Synthetic oligonucleotide
  modified_base (1)..(2): a, c, t, g, unknown or other
  modified_base (7)..(8): a, c, t, g, unknown or other
  modified_base (10)..(11): a, c, t, g, unknown or other
  modified_base (13)..(14): a, c, t, g, unknown or other
  modified_base (16)..(17): a, c, t, g, unknown or other
  modified_base (19)..(20): a, c, t, g, unknown or other
nnkgctnnknnknnknnknnktwt

SEQ ID NO: 358 - DNA, 27 bp, Artificial Sequence
  Description of Artificial Sequence: Synthetic oligonucleotide
  modified_base (1)..(2): a, c, t, g, unknown or other
  modified_base (7)..(8): a, c, t, g, unknown or other
  modified_base (10)..(11): a, c, t, g, unknown or other
  modified_base (13)..(14): a, c, t, g, unknown or other
  modified_base (16)..(17): a, c, t, g, unknown or other
  modified_base (19)..(20): a, c, t, g, unknown or other
  modified_base (22)..(23): a, c, t, g, unknown or other
nnkgctnnknnknnknnknnknnktwt

SEQ ID NO: 359 - DNA, 30 bp, Artificial Sequence
  Description of Artificial Sequence: Synthetic oligonucleotide
  modified_base (1)..(2): a, c, t, g, unknown or other
  modified_base (7)..(8): a, c, t, g, unknown or other
  modified_base (10)..(11): a, c, t, g, unknown or other
  modified_base (13)..(14): a, c, t, g, unknown or other
  modified_base (16)..(17): a, c, t, g, unknown or other
  modified_base (19)..(20): a, c, t, g, unknown or other
  modified_base (22)..(23): a, c, t, g, unknown or other
  modified_base (25)..(26): a, c, t, g, unknown or other
nnkgctnnknnknnknnknnknnknnktwt

SEQ ID NO: 360 - DNA, 33 bp, Artificial Sequence
  Description of Artificial Sequence: Synthetic oligonucleotide
  modified_base (1)..(2): a, c, t, g, unknown or other
  modified_base (7)..(8): a, c, t, g, unknown or other
  modified_base (10)..(11): a, c, t, g, unknown or other
  modified_base (13)..(14): a, c, t, g, unknown or other
  modified_base (16)..(17): a, c, t, g, unknown or other
  modified_base (19)..(20): a, c, t, g, unknown or other
  modified_base (22)..(23): a, c, t, g, unknown or other
  modified_base (25)..(26): a, c, t, g, unknown or other
  modified_base (28)..(29): a, c, t, g, unknown or other
nnkgctnnknnknnknnknnknnknnknnktwt

SEQ ID NO: 361 - DNA, 36 bp, Artificial Sequence
  Description of Artificial Sequence: Synthetic oligonucleotide
  modified_base (1)..(2): a, c, t, g, unknown or other
  modified_base (7)..(8): a, c, t, g, unknown or other
  modified_base (10)..(11): a, c, t, g, unknown or other
  modified_base (13)..(14): a, c, t, g, unknown or other
  modified_base (16)..(17): a, c, t, g, unknown or other
  modified_base (19)..(20): a, c, t, g, unknown or other
  modified_base (22)..(23): a, c, t, g, unknown or other
  modified_base (25)..(26): a, c, t, g, unknown or other
  modified_base (28)..(29): a, c, t, g, unknown or other
  modified_base (31)..(32): a, c, t, g, unknown or other
nnkgctnnknnknnknnknnknnknnknnknnktwt

SEQ ID NO: 362 - DNA, 24 bp, Artificial Sequence
  Description of Artificial Sequence: Synthetic oligonucleotide
  modified_base (1)..(2): a, c, t, g, unknown or other
  modified_base (4)..(5): a, c, t, g, unknown or other
  modified_base (7)..(8): a, c, t, g, unknown or other
  modified_base (10)..(11): a, c, t, g, unknown or other
  modified_base (13)..(14): a, c, t, g, unknown or other
  modified_base (16)..(17): a, c, t, g, unknown or other
  modified_base (19)..(20): a, c, t, g, unknown or other
nnknnknnknnknnknnknnkhtk

SEQ ID NO: 363 - DNA, 27 bp, Artificial Sequence
  Description of Artificial Sequence: Synthetic oligonucleotide
  modified_base (1)..(2): a, c, t, g, unknown or other
  modified_base (4)..(5): a, c, t, g, unknown or other
  modified_base (7)..(8): a, c, t, g, unknown or other
  modified_base (10)..(11): a, c, t, g, unknown or other
  modified_base (13)..(14): a, c, t, g, unknown or other
  modified_base (16)..(17): a, c, t, g, unknown or other
  modified_base (19)..(20): a, c, t, g, unknown or other
  modified_base (22)..(23): a, c, t, g, unknown or other
nnknnknnknnknnknnknnknnkhtk

SEQ ID NO: 364 - DNA, 30 bp, Artificial Sequence
  Description of Artificial Sequence: Synthetic oligonucleotide
  modified_base (1)..(2): a, c, t, g, unknown or other
  modified_base (4)..(5): a, c, t, g, unknown or other
  modified_base (7)..(8): a, c, t, g, unknown or other
  modified_base (10)..(11): a, c, t, g, unknown or other
  modified_base (13)..(14): a, c, t, g, unknown or other
  modified_base (16)..(17): a, c, t, g, unknown or other
  modified_base (19)..(20): a, c, t, g, unknown or other
  modified_base (22)..(23): a, c, t, g, unknown or other
  modified_base (25)..(26): a, c, t, g, unknown or other
nnknnknnknnknnknnknnknnknnkhtk

SEQ ID NO: 365 - DNA, 33 bp, Artificial Sequence
  Description of Artificial Sequence: Synthetic oligonucleotide
  modified_base (1)..(2): a, c, t, g, unknown or other
  modified_base (4)..(5): a, c, t, g, unknown or other
  modified_base (7)..(8): a, c, t, g, unknown or other
  modified_base (10)..(11): a, c, t, g, unknown or other
  modified_base (13)..(14): a, c, t, g, unknown or other
  modified_base (16)..(17): a, c, t, g, unknown or other
  modified_base (19)..(20): a, c, t, g, unknown or other
  modified_base (22)..(23): a, c, t, g, unknown or other
  modified_base (25)..(26): a, c, t, g, unknown or other
  modified_base (28)..(29): a, c, t, g, unknown or other
nnknnknnknnknnknnknnknnknnknnkhtk

SEQ ID NO: 366 - DNA, 36 bp, Artificial Sequence
  Description of Artificial Sequence: Synthetic oligonucleotide
  modified_base (1)..(2): a, c, t, g, unknown or other
  modified_base (4)..(5): a, c, t, g, unknown or other
  modified_base (7)..(8): a, c, t, g, unknown or other
  modified_base (10)..(11): a, c, t, g, unknown or other
  modified_base (13)..(14): a, c, t, g, unknown or other
  modified_base (16)..(17): a, c, t, g, unknown or other
  modified_base (19)..(20): a, c, t, g, unknown or other
  modified_base (22)..(23): a, c, t, g, unknown or other
  modified_base (25)..(26): a, c, t, g, unknown or other
  modified_base (28)..(29): a, c, t, g, unknown or other
  modified_base (31)..(32): a, c, t, g, unknown or other
nnknnknnknnknnknnknnknnknnknnknnkhtk

SEQ ID NO: 367 - DNA, 24 bp, Artificial Sequence
  Description of Artificial Sequence: Synthetic oligonucleotide
  modified_base (1)..(2): a, c, t, g, unknown or other
  modified_base (7)..(8): a, c, t, g, unknown or other
  modified_base (10)..(11): a, c, t, g, unknown or other
  modified_base (13)..(14): a, c, t, g, unknown or other
  modified_base (16)..(17): a, c, t, g, unknown or other
  modified_base (19)..(20): a, c, t, g, unknown or other
nnktwtnnknnknnknnknnkhtk

SEQ ID NO: 368 - DNA, 27 bp, Artificial Sequence
  Description of Artificial Sequence: Synthetic oligonucleotide
  modified_base (1)..(2): a, c, t, g, unknown or other
  modified_base (7)..(8): a, c, t, g, unknown or other
  modified_base (10)..(11): a, c, t, g, unknown or other
  modified_base (13)..(14): a, c, t, g, unknown or other
  modified_base (16)..(17): a, c, t, g, unknown or other
  modified_base (19)..(20): a, c, t, g, unknown or other
  modified_base (22)..(23): a, c, t, g, unknown or other
nnktwtnnknnknnknnknnknnkhtk

SEQ ID NO: 369 - DNA, 30 bp, Artificial Sequence
  Description of Artificial Sequence: Synthetic oligonucleotide
  modified_base (1)..(2): a, c, t, g, unknown or other
  modified_base (7)..(8): a, c, t, g, unknown or other
  modified_base (10)..(11): a, c, t, g, unknown or other
  modified_base (13)..(14): a, c, t, g, unknown or other
  modified_base (16)..(17): a, c, t, g, unknown or other
  modified_base (19)..(20): a, c, t, g, unknown or other
  modified_base (22)..(23): a, c, t, g, unknown or other
  modified_base (25)..(26): a, c, t, g, unknown or other
nnktwtnnknnknnknnknnknnknnkhtk

SEQ ID NO: 370 - DNA, 33 bp, Artificial Sequence
  Description of Artificial Sequence: Synthetic oligonucleotide
  modified_base (1)..(2): a, c, t, g, unknown or other
  modified_base (7)..(8): a, c, t, g, unknown or other
  modified_base (10)..(11): a, c, t, g, unknown or other
  modified_base (13)..(14): a, c, t, g, unknown or other
  modified_base (16)..(17): a, c, t, g, unknown or other
  modified_base (19)..(20): a, c, t, g, unknown or other
  modified_base (22)..(23): a, c, t, g, unknown or other
  modified_base (25)..(26): a, c, t, g, unknown or other
  modified_base (28)..(29): a, c, t, g, unknown or other
nnktwtnnknnknnknnknnknnknnknnkhtk

SEQ ID NO: 371 - DNA, 36 bp, Artificial Sequence
  Description of Artificial Sequence: Synthetic oligonucleotide
  modified_base (1)..(2): a, c, t, g, unknown or other
  modified_base (7)..(8): a, c, t, g, unknown or other
  modified_base (10)..(11): a, c, t, g, unknown or other
  modified_base (13)..(14): a, c, t, g, unknown or other
  modified_base (16)..(17): a, c, t, g, unknown or other
  modified_base (19)..(20): a, c, t, g, unknown or other
  modified_base (22)..(23): a, c, t, g, unknown or other
  modified_base (25)..(26): a, c, t, g, unknown or other
  modified_base (28)..(29): a, c, t, g, unknown or other
  modified_base (31)..(32): a, c, t, g, unknown or other
nnktwtnnknnknnknnknnknnknnknnknnkhtk

SEQ ID NO: 372 - DNA, 24 bp, Artificial Sequence
  Description of Artificial Sequence: Synthetic oligonucleotide
  modified_base (1)..(2): a, c, t, g, unknown or other
  modified_base (7)..(8): a, c, t, g, unknown or other
  modified_base (10)..(11): a, c, t, g, unknown or other
  modified_base (13)..(14): a, c, t, g, unknown or other
  modified_base (16)..(17): a, c, t, g, unknown or other
  modified_base (19)..(20): a, c, t, g, unknown or other
nnkcctnnknnknnknnknnkhtk

SEQ ID NO: 373 - DNA, 27 bp, Artificial Sequence
  Description of Artificial Sequence: Synthetic oligonucleotide
  modified_base (1)..(2): a, c, t, g, unknown or other
  modified_base (7)..(8): a, c, t, g, unknown or other
  modified_base (10)..(11): a, c, t, g, unknown or other
  modified_base (13)..(14): a, c, t, g, unknown or other
  modified_base (16)..(17): a, c, t, g, unknown or other
  modified_base (19)..(20): a, c, t, g, unknown or other
  modified_base (22)..(23): a, c, t, g, unknown or other
nnkcctnnknnknnknnknnknnkhtk

SEQ ID NO: 374 - DNA, 30 bp, Artificial Sequence
  Description of Artificial Sequence: Synthetic oligonucleotide
  modified_base (1)..(2): a, c, t, g, unknown or other
  modified_base (7)..(8): a, c, t, g, unknown or other
  modified_base (10)..(11): a, c, t, g, unknown or other
  modified_base (13)..(14): a, c, t, g, unknown or other
  modified_base (16)..(17): a, c, t, g, unknown or other
  modified_base (19)..(20): a, c, t, g, unknown or other
  modified_base (22)..(23): a, c, t, g, unknown or other
  modified_base (25)..(26): a, c, t, g, unknown or other
nnkcctnnknnknnknnknnknnknnkhtk

SEQ ID NO: 375 - DNA, 33 bp, Artificial Sequence
  Description of Artificial Sequence: Synthetic oligonucleotide
  modified_base (1)..(2): a, c, t, g, unknown or other
  modified_base (7)..(8): a, c, t, g, unknown or other
  modified_base (10)..(11): a, c, t, g, unknown or other
  modified_base (13)..(14): a, c, t, g, unknown or other
  modified_base (16)..(17): a, c, t, g, unknown or other
  modified_base (19)..(20): a, c, t, g, unknown or other
  modified_base (22)..(23): a, c, t, g, unknown or other
  modified_base (25)..(26): a, c, t, g, unknown or other
  modified_base (28)..(29): a, c, t, g, unknown or other
nnkcctnnknnknnknnknnknnknnknnkhtk

SEQ ID NO: 376 - DNA, 36 bp, Artificial Sequence
  Description of Artificial Sequence: Synthetic oligonucleotide
  modified_base (1)..(2): a, c, t, g, unknown or other
  modified_base (7)..(8): a, c, t, g, unknown or other
  modified_base (10)..(11): a, c, t, g, unknown or other
  modified_base (13)..(14): a, c, t, g, unknown or other
  modified_base (16)..(17): a, c, t, g, unknown or other
  modified_base (19)..(20): a, c, t, g, unknown or other
  modified_base (22)..(23): a, c, t, g, unknown or other
  modified_base (25)..(26): a, c, t, g, unknown or other
  modified_base (28)..(29): a, c, t, g, unknown or other
  modified_base (31)..(32): a, c, t, g, unknown or other
nnkcctnnknnknnknnknnknnknnknnknnkhtk

SEQ ID NO: 377 - DNA, 24 bp, Artificial Sequence
  Description of Artificial Sequence: Synthetic oligonucleotide
  modified_base (1)..(2): a, c, t, g, unknown or other
  modified_base (4)..(5): a, c, t, g, unknown or other
  modified_base (10)..(11): a, c, t, g, unknown or other
  modified_base (13)..(14): a, c, t, g, unknown or other
  modified_base (16)..(17): a, c, t, g, unknown or other
  modified_base (19)..(20): a, c, t, g, unknown or other
nnknnkgatnnknnknnknnkstt

SEQ ID NO: 378 - DNA, 27 bp, Artificial Sequence
  Description of Artificial Sequence: Synthetic oligonucleotide
  modified_base (1)..(2): a, c, t, g, unknown or other
  modified_base (4)..(5): a, c, t, g, unknown or other
  modified_base (10)..(11): a, c, t, g, unknown or other
  modified_base (13)..(14): a, c, t, g, unknown or other
  modified_base (16)..(17): a, c, t, g, unknown or other
  modified_base (19)..(20): a, c, t, g, unknown or other
  modified_base (22)..(23): a, c, t, g, unknown or other
nnknnkgatnnknnknnknnknnkstt

SEQ ID NO: 379 - DNA, 30 bp, Artificial Sequence
  Description of Artificial Sequence: Synthetic oligonucleotide
  modified_base (1)..(2): a, c, t, g, unknown or other
  modified_base (4)..(5): a, c, t, g, unknown or other
  modified_base (7)..(8): a, c, t, g, unknown or other
  modified_base (13)..(14): a, c, t, g, unknown or other
  modified_base (16)..(17): a, c, t, g, unknown or other
  modified_base (19)..(20): a, c, t, g, unknown or other
  modified_base (22)..(23): a, c, t, g, unknown or other
  modified_base (25)..(26): a, c, t, g, unknown or other
nnknnknnkgatnnknnknnknnknnkstt

SEQ ID NO: 380 - DNA, 33 bp, Artificial Sequence
  Description of Artificial Sequence: Synthetic oligonucleotide
  modified_base (1)..(2): a, c, t, g, unknown or other
  modified_base (4)..(5): a, c, t, g, unknown or other
  modified_base (7)..(8): a, c, t, g, unknown or other
  modified_base (10)..(11): a, c, t, g, unknown or other
  modified_base (16)..(17): a, c, t, g, unknown or other
  modified_base (19)..(20): a, c, t, g, unknown or other
  modified_base (22)..(23): a, c, t, g, unknown or other
  modified_base (25)..(26): a, c, t, g, unknown or other
  modified_base (28)..(29): a, c, t, g, unknown or other
nnknnknnknnkgatnnknnknnknnknnkstt

SEQ ID NO: 381 - DNA, 36 bp, Artificial Sequence
  Description of Artificial Sequence: Synthetic oligonucleotide
  modified_base (1)..(2): a, c, t, g, unknown or other
  modified_base (4)..(5): a, c, t, g, unknown or other
  modified_base (7)..(8): a, c, t, g, unknown or other
  modified_base (10)..(11): a, c, t, g, unknown or other
  modified_base (16)..(17): a, c, t, g, unknown or other
  modified_base (19)..(20): a, c, t, g, unknown or other
  modified_base (22)..(23): a, c, t, g, unknown or other
  modified_base (25)..(26): a, c, t, g, unknown or other
  modified_base (28)..(29): a, c, t, g, unknown or other
  modified_base (31)..(32): a, c, t, g, unknown or other
nnknnknnknnkgatnnknnknnknnknnknnkstt

SEQ ID NO: 382 - DNA, 24 bp, Artificial Sequence
  Description of Artificial Sequence: Synthetic oligonucleotide
  modified_base (1)..(2): a, c, t, g, unknown or other
  modified_base (4)..(5): a, c, t, g, unknown or other
  modified_base (7)..(8): a, c, t, g, unknown or other
  modified_base (10)..(11): a, c, t, g, unknown or other
  modified_base (13)..(14): a, c, t, g, unknown or other
  modified_base (16)..(17): a, c, t, g, unknown or other
  modified_base (19)..(20): a, c, t, g, unknown or other
nnknnknnknnknnknnknnkvtt

SEQ ID NO: 383 - DNA, 27 bp, Artificial Sequence
  Description of Artificial Sequence: Synthetic oligonucleotide
  modified_base (1)..(2): a, c, t, g, unknown or other
  modified_base (4)..(5): a, c, t, g, unknown or other
  modified_base (7)..(8): a, c, t, g, unknown or other
  modified_base (10)..(11): a, c, t, g, unknown or other
  modified_base (13)..(14): a, c, t, g, unknown or other
  modified_base (16)..(17): a, c, t, g, unknown or other
  modified_base (19)..(20): a, c, t, g, unknown or other
  modified_base (22)..(23): a, c, t, g, unknown or other
nnknnknnknnknnknnknnknnkvtt

SEQ ID NO: 384 - DNA, 30 bp, Artificial Sequence
  Description of Artificial Sequence: Synthetic oligonucleotide
  modified_base (1)..(2): a, c, t, g, unknown or other
  modified_base (4)..(5): a, c, t, g, unknown or other
  modified_base (7)..(8): a, c, t, g, unknown or other
  modified_base (10)..(11): a, c, t, g, unknown or other
  modified_base (13)..(14): a, c, t, g, unknown or other
  modified_base (16)..(17): a, c, t, g, unknown or other
  modified_base (19)..(20): a, c, t, g, unknown or other
  modified_base (22)..(23): a, c, t, g, unknown or other
  modified_base (25)..(26): a, c, t, g, unknown or other
nnknnknnknnknnknnknnknnknnkvtt

SEQ ID NO: 385 - DNA, 33 bp, Artificial Sequence
  Description of Artificial Sequence: Synthetic oligonucleotide
  modified_base (1)..(2): a, c, t, g, unknown or other
  modified_base (4)..(5): a, c, t, g, unknown or other
  modified_base (7)..(8): a, c, t, g, unknown or other
  modified_base (10)..(11): a, c, t, g, unknown or other
  modified_base (13)..(14): a, c, t, g, unknown or other
  modified_base (16)..(17): a, c, t, g, unknown or other
  modified_base (19)..(20): a, c, t, g, unknown or other
  modified_base (22)..(23): a, c, t, g, unknown or other
  modified_base (25)..(26): a, c, t, g, unknown or other
  modified_base (28)..(29): a, c, t, g, unknown or other
nnknnknnknnknnknnknnknnknnknnkvtt

SEQ ID NO: 386 - DNA, 36 bp, Artificial Sequence
  Description of Artificial Sequence: Synthetic oligonucleotide
  modified_base (1)..(2): a, c, t, g, unknown or other
  modified_base (4)..(5): a, c, t, g, unknown or other
  modified_base (7)..(8): a, c, t, g, unknown or other
  modified_base (10)..(11): a, c, t, g, unknown or other
  modified_base (13)..(14): a, c, t, g, unknown or other
  modified_base (16)..(17): a, c, t, g, unknown or other
  modified_base (19)..(20): a, c, t, g, unknown or other
  modified_base (22)..(23): a, c, t, g, unknown or other
  modified_base (25)..(26): a, c, t, g, unknown or other
  modified_base (28)..(29): a, c, t, g, unknown or other
  modified_base (31)..(32): a, c, t, g, unknown or other
nnknnknnknnknnknnknnknnknnknnknnkvtt

SEQ ID NO: 387 - DNA, 24 bp, Artificial Sequence
  Description of Artificial Sequence: Synthetic oligonucleotide
  modified_base (1)..(2): a, c, t, g, unknown or other
  modified_base (4)..(5): a, c, t, g, unknown or other
  modified_base (7)..(8): a, c, t, g, unknown or other
  modified_base (10)..(11): a, c, t, g, unknown or other
  modified_base (13)..(14): a, c, t, g, unknown or other
  modified_base (16)..(17): a, c, t, g, unknown or other
  modified_base (19)..(20): a, c, t, g, unknown or other
nnknnknnknnknnknnknnktat

SEQ ID NO: 388 - DNA, 27 bp, Artificial Sequence
  Description of Artificial Sequence: Synthetic oligonucleotide
  modified_base (1)..(2): a, c, t, g, unknown or other
  modified_base (4)..(5): a, c, t, g, unknown or other
  modified_base (7)..(8): a, c, t, g, unknown or other
  modified_base (10)..(11): a, c, t, g, unknown or other
  modified_base (13)..(14): a, c, t, g, unknown or other
  modified_base (16)..(17): a, c, t, g, unknown or other
  modified_base (19)..(20): a, c, t, g, unknown or other
  modified_base (22)..(23): a, c, t, g, unknown or other
nnknnknnknnknnknnknnknnktat

SEQ ID NO: 389 - DNA, 30 bp, Artificial Sequence
  Description of Artificial Sequence: Synthetic oligonucleotide
  modified_base (1)..(2): a, c, t, g, unknown or other
  modified_base (4)..(5): a, c, t, g, unknown or other
  modified_base (7)..(8): a, c, t, g, unknown or other
  modified_base (10)..(11): a, c, t, g, unknown or other
  modified_base (13)..(14): a, c, t, g, unknown or other
  modified_base (16)..(17): a, c, t, g, unknown or other
  modified_base (19)..(20): a, c, t, g, unknown or other
  modified_base (22)..(23): a, c, t, g, unknown or other
  modified_base (25)..(26): a, c, t, g, unknown or other
nnknnknnknnknnknnknnknnknnktat

SEQ ID NO: 390 - DNA, 33 bp, Artificial Sequence
  Description of Artificial Sequence: Synthetic oligonucleotide
  modified_base (1)..(2): a, c, t, g, unknown or other
  modified_base (4)..(5): a, c, t, g, unknown or other
  modified_base (7)..(8): a, c, t, g, unknown or other
  modified_base (10)..(11): a, c, t, g, unknown or other
  modified_base (13)..(14): a, c, t, g, unknown or other
  modified_base (16)..(17): a, c, t, g, unknown or other
  modified_base (19)..(20): a, c, t, g, unknown or other
  modified_base (22)..(23): a, c, t, g, unknown or other
  modified_base (25)..(26): a, c, t, g, unknown or other
  modified_base (28)..(29): a, c, t, g, unknown or other
nnknnknnknnknnknnknnknnknnknnktat

SEQ ID NO: 391 - DNA, 36 bp, Artificial Sequence
  Description of Artificial Sequence: Synthetic oligonucleotide
  modified_base (1)..(2): a, c, t, g, unknown or other
  modified_base (4)..(5): a, c, t, g, unknown or other
  modified_base (7)..(8): a, c, t, g, unknown or other
  modified_base (10)..(11): a, c, t, g, unknown or other
  modified_base (13)..(14): a, c, t, g, unknown or other
  modified_base (16)..(17): a, c, t, g, unknown or other
  modified_base (19)..(20): a, c, t, g, unknown or other
  modified_base (22)..(23): a, c, t, g, unknown or other
  modified_base (25)..(26): a, c, t, g, unknown or other
  modified_base (28)..(29): a, c, t, g, unknown or other
  modified_base (31)..(32): a, c, t, g, unknown or other
nnknnknnknnknnknnknnknnknnknnknnktat

SEQ ID NO: 392 - DNA, 24 bp, Artificial Sequence
  Description of Artificial Sequence: Synthetic oligonucleotide
  modified_base (1)..(2): a, c, t, g, unknown or other
  modified_base (4)..(5): a, c, t, g, unknown or other
  modified_base (7)..(8): a, c, t, g, unknown or other
  modified_base (10)..(11): a, c, t, g, unknown or other
  modified_base (13)..(14): a, c, t, g, unknown or other
  modified_base (16)..(17): a, c, t, g, unknown or other
  modified_base (19)..(20): a, c, t, g, unknown or other
nnknnknnknnknnknnknnkytt

SEQ ID NO: 393 - DNA, 27 bp, Artificial Sequence
  Description of Artificial Sequence: Synthetic oligonucleotide
  modified_base (1)..(2): a, c, t, g, unknown or other
  modified_base (4)..(5): a, c, t, g, unknown or other
  modified_base (7)..(8): a, c, t, g, unknown or other
  modified_base (10)..(11): a, c, t, g, unknown or other
  modified_base (13)..(14): a, c, t, g, unknown or other
  modified_base (16)..(17): a, c, t, g, unknown or other
  modified_base (19)..(20): a, c, t, g, unknown or other
  modified_base (22)..(23): a, c, t, g, unknown or other
nnknnknnknnknnknnknnknnkytt

SEQ ID NO: 394 - DNA, 30 bp, Artificial Sequence
  Description of Artificial Sequence: Synthetic oligonucleotide
  modified_base (1)..(2): a, c, t, g, unknown or other
  modified_base (4)..(5): a, c, t, g, unknown or other
  modified_base (7)..(8): a, c, t, g, unknown or other
  modified_base (10)..(11): a, c, t, g, unknown or other
  modified_base (13)..(14): a, c, t, g, unknown or other
  modified_base (16)..(17): a, c, t, g, unknown or other
  modified_base (19)..(20): a, c, t, g, unknown or other
  modified_base (22)..(23): a, c, t, g, unknown or other
  modified_base (25)..(26): a, c, t, g, unknown or other
nnknnknnknnknnknnknnknnknnkytt

SEQ ID NO: 395 - DNA, 33 bp, Artificial Sequence
  Description of Artificial Sequence: Synthetic oligonucleotide
  modified_base (1)..(2): a, c, t, g, unknown or other
  modified_base (4)..(5): a, c, t, g, unknown or other
  modified_base (7)..(8): a, c, t, g, unknown or other
  modified_base (10)..(11): a, c, t, g, unknown or other
  modified_base (13)..(14): a, c, t, g, unknown or other
  modified_base (16)..(17): a, c, t, g, unknown or other
  modified_base (19)..(20): a, c, t, g, unknown or other
  modified_base (22)..(23): a, c, t, g, unknown or other
  modified_base (25)..(26): a, c, t, g, unknown or other
  modified_base (28)..(29): a, c, t, g, unknown or other
nnknnknnknnknnknnknnknnknnknnkytt

SEQ ID NO: 396 - DNA, 36 bp, Artificial Sequence
  Description of Artificial Sequence: Synthetic oligonucleotide
  modified_base (1)..(2): a, c, t, g, unknown or other
  modified_base (4)..(5): a, c, t, g, unknown or other
  modified_base (7)..(8): a, c, t, g, unknown or other
  modified_base (10)..(11): a, c, t, g, unknown or other
  modified_base (13)..(14): a, c, t, g, unknown or other
  modified_base (16)..(17): a, c, t, g, unknown or other
  modified_base (19)..(20): a, c, t, g, unknown or other
  modified_base (22)..(23): a, c, t, g, unknown or other
  modified_base (25)..(26): a, c, t, g, unknown or other
  modified_base (28)..(29): a, c, t, g, unknown or other
  modified_base (31)..(32): a, c, t, g, unknown or other
nnknnknnknnknnknnknnknnknnknnknnkytt

SEQ ID NO: 397 - DNA, 24 bp, Artificial Sequence
  Description of Artificial Sequence: Synthetic oligonucleotide
  modified_base (1)..(2): a, c, t, g, unknown or other
  modified_base (4)..(5): a, c, t, g, unknown or other
  modified_base (7)..(8): a, c, t, g, unknown or other
  modified_base (10)..(11): a, c, t, g, unknown or other
  modified_base (13)..(14): a, c, t, g, unknown or other
  modified_base (16)..(17): a, c, t, g, unknown or other
  modified_base (19)..(20): a, c, t, g, unknown or other
nnknnknnknnknnknnknnktat

SEQ ID NO: 398 - DNA, 27 bp, Artificial Sequence
  Description of Artificial Sequence: Synthetic oligonucleotide
  modified_base (1)..(2): a, c, t, g, unknown or other
  modified_base (4)..(5): a, c, t, g, unknown or other
  modified_base (7)..(8): a, c, t, g, unknown or other
  modified_base (10)..(11): a, c, t, g, unknown or other
  modified_base (13)..(14): a, c, t, g, unknown or other
  modified_base (16)..(17): a, c, t, g, unknown or other
  modified_base (19)..(20): a, c, t, g, unknown or other
  modified_base (22)..(23): a, c, t, g, unknown or other
nnknnknnknnknnknnknnknnktat

SEQ ID NO: 399 - DNA, 30 bp, Artificial Sequence; identical to SEQ ID NO: 389
  Description of Artificial Sequence: Synthetic oligonucleotide
  modified_base (1)..(2): a, c, t, g, unknown or other
  modified_base (4)..(5): a, c, t, g, unknown or other
  modified_base (7)..(8): a, c, t, g, unknown or other
  modified_base (10)..(11): a, c, t, g, unknown or other
  modified_base (13)..(14): a, c, t, g, unknown or other
  modified_base (16)..(17): a, c, t, g, unknown or other
  modified_base (19)..(20): a, c, t, g, unknown or other
  modified_base (22)..(23): a, c, t, g, unknown or other
  modified_base (25)..(26): a, c, t, g, unknown or other

SEQ ID NO: 400 - DNA, 33 bp, Artificial Sequence; identical to SEQ ID NO: 390
  Description of Artificial Sequence: Synthetic oligonucleotide
  modified_base (1)..(2): a, c, t, g, unknown or other
  modified_base (4)..(5): a, c, t, g, unknown or other
  modified_base (7)..(8): a, c, t, g, unknown or other
  modified_base (10)..(11): a, c, t, g, unknown or other
  modified_base (13)..(14): a, c, t, g, unknown or other
  modified_base (16)..(17): a, c, t, g, unknown or other
  modified_base (19)..(20): a, c, t, g, unknown or other
  modified_base (22)..(23): a, c, t, g, unknown or other
  modified_base (25)..(26): a, c, t, g, unknown or other
  modified_base (28)..(29): a, c, t, g, unknown or other

SEQ ID NO: 401 - DNA, 36 bp, Artificial Sequence; identical to SEQ ID NO: 391
  Description of Artificial Sequence: Synthetic oligonucleotide
  modified_base (1)..(2): a, c, t, g, unknown or other
  modified_base (4)..(5): a, c, t, g, unknown or other
  modified_base (7)..(8): a, c, t, g, unknown or other
  modified_base (10)..(11): a, c, t, g, unknown or other
  modified_base (13)..(14): a, c, t, g, unknown or other
  modified_base (16)..(17): a, c, t, g, unknown or other
  modified_base (19)..(20): a, c, t, g, unknown or other
  modified_base (22)..(23): a, c, t, g, unknown or other
  modified_base (25)..(26): a, c, t, g, unknown or other
  modified_base (28)..(29): a, c, t, g, unknown or other
  modified_base (31)..(32): a, c, t, g, unknown or other

SEQ ID NO: 402 - DNA, 21 bp, Artificial Sequence
  Description of Artificial Sequence: Synthetic oligonucleotide
  modified_base (1)..(2): a, c, t, g, unknown or other
  modified_base (4)..(5): a, c, t, g, unknown or other
  modified_base (10)..(11): a, c, t, g, unknown or other
  modified_base (13)..(14): a, c, t, g, unknown or other
  modified_base (16)..(17): a, c, t, g, unknown or other
nnknnkgatnnknnknnkctt

SEQ ID NO: 403 - DNA, 24 bp, Artificial Sequence
  Description of Artificial Sequence: Synthetic oligonucleotide
  modified_base (1)..(2): a, c, t, g, unknown or other
  modified_base (4)..(5): a, c, t, g, unknown or other
  modified_base (10)..(11): a, c, t, g, unknown or other
  modified_base (13)..(14): a, c, t, g, unknown or other
  modified_base (16)..(17): a, c, t, g, unknown or other
  modified_base (19)..(20): a, c, t, g, unknown or other
nnknnkgatnnknnknnknnkctt

SEQ ID NO: 404 - DNA, 27 bp, Artificial Sequence
  Description of Artificial Sequence: Synthetic oligonucleotide
  modified_base (1)..(2): a, c, t, g, unknown or other
  modified_base (4)..(5): a, c, t, g, unknown or other
  modified_base (10)..(11): a, c, t, g, unknown or other
  modified_base (13)..(14): a, c, t, g, unknown or other
  modified_base (16)..(17): a, c, t, g, unknown or other
  modified_base (19)..(20): a, c, t, g, unknown or other
  modified_base (22)..(23): a, c, t, g, unknown or other
nnknnkgatnnknnknnknnknnkctt

SEQ ID NO: 405 - DNA, 30 bp, Artificial Sequence
  Description of Artificial Sequence: Synthetic oligonucleotide
  modified_base (1)..(2): a, c, t, g, unknown or other
  modified_base (4)..(5): a, c, t, g, unknown or other
  modified_base (10)..(11): a, c, t, g, unknown or other
  modified_base (13)..(14): a, c, t, g, unknown or other
  modified_base (16)..(17): a, c, t, g, unknown or other
  modified_base (19)..(20): a, c, t, g, unknown or other
  modified_base (22)..(23): a, c, t, g, unknown or other
  modified_base (25)..(26): a, c, t, g, unknown or other
nnknnkgatnnknnknnknnknnknnkctt

SEQ ID NO: 406 - DNA, 33 bp, Artificial Sequence
  Description of Artificial Sequence: Synthetic oligonucleotide
  modified_base (1)..(2): a, c, t, g, unknown or other
  modified_base (4)..(5): a, c, t, g, unknown or other
  modified_base (10)..(11): a, c, t, g, unknown or other
  modified_base (13)..(14): a, c, t, g, unknown or other
  modified_base (16)..(17): a, c, t, g, unknown or other
  modified_base (19)..(20): a, c, t, g, unknown or other
  modified_base (22)..(23): a, c, t, g, unknown or other
  modified_base (25)..(26): a, c, t, g, unknown or other
  modified_base (28)..(29): a, c, t, g, unknown or other
nnknnkgatnnknnknnknnknnknnknnkctt

SEQ ID NO: 407 - DNA, 24 bp, Artificial Sequence
  Description of Artificial Sequence: Synthetic oligonucleotide
  modified_base (1)..(2): a, c, t, g, unknown or other
  modified_base (7)..(8): a, c, t, g, unknown or other
  modified_base (10)..(11): a, c, t, g, unknown or other
  modified_base (13)..(14): a, c, t, g, unknown or other
  modified_base (16)..(17): a, c, t, g, unknown or other
  modified_base (19)..(20): a, c, t, g, unknown or other
nnkmtgnnknnknnknnknnkstt

SEQ ID NO: 408 - DNA, 27 bp, Artificial Sequence
  Description of Artificial Sequence: Synthetic oligonucleotide
  modified_base (1)..(2): a, c, t, g, unknown or other
  modified_base (7)..(8): a, c, t, g, unknown or other
  modified_base (10)..(11): a, c, t, g, unknown or other
  modified_base (13)..(14): a, c, t, g, unknown or other
  modified_base (16)..(17): a, c, t, g, unknown or other
  modified_base (19)..(20): a, c, t, g, unknown or other
  modified_base (22)..(23): a, c, t, g, unknown or other
nnkmtgnnknnknnknnknnknnkstt

SEQ ID NO: 409 - DNA, 30 bp, Artificial Sequence
  Description of Artificial Sequence: Synthetic oligonucleotide
  modified_base (1)..(2): a, c, t, g, unknown or other
  modified_base (7)..(8): a, c, t, g, unknown or other
  modified_base (10)..(11): a, c, t, g, unknown or other
  modified_base (13)..(14): a, c, t, g, unknown or other
  modified_base (16)..(17): a, c, t, g, unknown or other
  modified_base (19)..(20): a, c, t, g, unknown or other
  modified_base (22)..(23): a, c, t, g, unknown or other
  modified_base (25)..(26): a, c, t, g, unknown or other
nnkmtgnnknnknnknnknnknnknnkstt

SEQ ID NO: 410 - DNA, 33 bp, Artificial Sequence
  Description of Artificial Sequence: Synthetic oligonucleotide
  modified_base (1)..(2): a, c, t, g, unknown or other
  modified_base (7)..(8): a, c, t, g, unknown or other
  modified_base (10)..(11): a, c, t, g, unknown or other
  modified_base (13)..(14): a, c, t, g, unknown or other
  modified_base (16)..(17): a, c, t, g, unknown or other
  modified_base (19)..(20): a, c, t, g, unknown or other
  modified_base (22)..(23): a, c, t, g, unknown or other
  modified_base (25)..(26): a, c, t, g, unknown or other
  modified_base (28)..(29): a, c, t, g, unknown or other
nnkmtgnnknnknnknnknnknnknnknnkstt

SEQ ID NO: 411 - DNA, 36 bp, Artificial Sequence
  Description of Artificial Sequence: Synthetic oligonucleotide
  modified_base (1)..(2): a, c, t, g, unknown or other
  modified_base (7)..(8): a, c, t, g, unknown or other
  modified_base (10)..(11): a, c, t, g, unknown or other
  modified_base (13)..(14): a, c, t, g, unknown or other
  modified_base (16)..(17): a, c, t, g, unknown or other
  modified_base (19)..(20): a, c, t, g, unknown or other
  modified_base (22)..(23): a, c, t, g, unknown or other
  modified_base (25)..(26): a, c, t, g, unknown or other
  modified_base (28)..(29): a, c, t, g, unknown or other
  modified_base (31)..(32): a, c, t, g, unknown or other
nnkmtgnnknnknnknnknnknnknnknnknnkstt

SEQ ID NO: 412 - DNA, 24 bp, Artificial Sequence
  Description of Artificial Sequence: Synthetic oligonucleotide
  modified_base (1)..(2): a, c, t, g, unknown or other
  modified_base (7)..(8): a, c, t, g, unknown or other
  modified_base (10)..(11): a, c, t, g, unknown or other
  modified_base (13)..(14): a, c, t, g, unknown or other
  modified_base (16)..(17): a, c, t, g, unknown or other
  modified_base (19)..(20): a, c, t, g, unknown or other
nnkvttnnknnknnknnknnkara

SEQ ID NO: 413 - DNA, 27 bp, Artificial Sequence
  Description of Artificial Sequence: Synthetic oligonucleotide
  modified_base (1)..(2): a, c, t, g, unknown or other
  modified_base (7)..(8): a, c, t, g, unknown or other
  modified_base (10)..(11): a, c, t, g, unknown or other
  modified_base (13)..(14): a, c, t, g, unknown or other
  modified_base (16)..(17): a, c, t, g, unknown or other
  modified_base (19)..(20): a, c, t, g, unknown or other
  modified_base (22)..(23): a, c, t, g, unknown or other
nnkvttnnknnknnknnknnknnkara

SEQ ID NO: 414 - DNA, 30 bp, Artificial Sequence
  Description of Artificial Sequence: Synthetic oligonucleotide
  modified_base (1)..(2): a, c, t, g, unknown or other
  modified_base (7)..(8): a, c, t, g, unknown or other
  modified_base (10)..(11): a, c, t, g, unknown or other
  modified_base (13)..(14): a, c, t, g, unknown or other
  modified_base (16)..(17): a, c, t, g, unknown or other
  modified_base (19)..(20): a, c, t, g, unknown or other
  modified_base (22)..(23): a, c, t, g, unknown or other
  modified_base (25)..(26): a, c, t, g, unknown or other
nnkvttnnknnknnknnknnknnknnkara

SEQ ID NO: 415 - DNA, 33 bp, Artificial Sequence
  Description of Artificial Sequence: Synthetic oligonucleotide
  modified_base (1)..(2): a, c, t, g, unknown or other
  modified_base (7)..(8): a, c, t, g, unknown or other
  modified_base (10)..(11): a, c, t, g, unknown or other
  modified_base (13)..(14): a, c, t, g, unknown or other
  modified_base (16)..(17): a, c, t, g, unknown or other
  modified_base (19)..(20): a, c, t, g, unknown or other
  modified_base (22)..(23): a, c, t, g, unknown or other
  modified_base (25)..(26): a, c, t, g, unknown or other
  modified_base (28)..(29): a, c, t, g, unknown or other
nnkvttnnknnknnknnknnknnknnknnkara

SEQ ID NO: 416 - DNA, 36 bp, Artificial Sequence
  Description of Artificial Sequence: Synthetic oligonucleotide
  modified_base (1)..(2): a, c, t, g, unknown or other
  modified_base (7)..(8): a, c, t, g, unknown or other
  modified_base (10)..(11): a, c, t, g, unknown or other
  modified_base (13)..(14): a, c, t, g, unknown or other
  modified_base (16)..(17): a, c, t, g, unknown or other
  modified_base (19)..(20): a, c, t, g, unknown or other
  modified_base (22)..(23): a, c, t, g, unknown or other
  modified_base (25)..(26): a, c, t, g, unknown or other
  modified_base (28)..(29): a, c, t, g, unknown or other
  modified_base (31)..(32): a, c, t, g, unknown or other
nnkvttnnknnknnknnknnknnknnknnknnkara

SEQ ID NO: 417 - DNA, 27 bp, Artificial Sequence
  Description of Artificial Sequence: Synthetic oligonucleotide
  modified_base (1)..(2): a, c, t, g, unknown or other
  modified_base (7)..(8): a, c, t, g, unknown or other
  modified_base (10)..(11): a, c, t, g, unknown or other
  modified_base (13)..(14): a, c, t, g, unknown or other
  modified_base (16)..(17): a, c, t, g, unknown or other
  modified_base (19)..(20): a, c, t, g, unknown or other
  modified_base (22)..(23): a, c, t, g, unknown or other
nnktwtnnknnknnknnknnknnkara

SEQ ID NO: 418 - DNA, 24 bp, Artificial Sequence
  Description of Artificial Sequence: Synthetic oligonucleotide
  modified_base (1)..(2): a, c, t, g, unknown or other
  modified_base (7)..(8): a, c, t, g, unknown or other
  modified_base (10)..(11): a, c, t, g, unknown or other
  modified_base (13)..(14): a, c, t, g, unknown or other
  modified_base (16)..(17): a, c, t, g, unknown or other
  modified_base (19)..(20): a, c, t, g, unknown or other
nnktwtnnknnknnknnknnkara

SEQ ID NO: 419 - DNA, 30 bp, Artificial Sequence
  Description of Artificial Sequence: Synthetic oligonucleotide
  modified_base (1)..(2): a, c, t, g, unknown or other
  modified_base (7)..(8): a, c, t, g, unknown or other
  modified_base (10)..(11): a, c, t, g, unknown or other
  modified_base (13)..(14): a, c, t, g, unknown or other
  modified_base (16)..(17): a, c, t, g, unknown or other
  modified_base (19)..(20): a, c, t, g, unknown or other
  modified_base (22)..(23): a, c, t, g, unknown or other
  modified_base (25)..(26): a, c, t, g, unknown or other
nnktwtnnknnknnknnknnknnknnkara

SEQ ID NO: 420 - DNA, 33 bp, Artificial Sequence
  Description of Artificial Sequence: Synthetic oligonucleotide
  modified_base (1)..(2): a, c, t, g, unknown or other
  modified_base (7)..(8): a, c, t, g, unknown or other
  modified_base (10)..(11): a, c, t, g, unknown or other
  modified_base (13)..(14): a, c, t, g, unknown or other
  modified_base (16)..(17): a, c, t, g, unknown or other
  modified_base (19)..(20): a, c, t, g, unknown or other
  modified_base (22)..(23): a, c, t, g, unknown or other
  modified_base (25)..(26): a, c, t, g, unknown or other
  modified_base (28)..(29): a, c, t, g, unknown or other
nnktwtnnknnknnknnknnknnknnknnkara

SEQ ID NO: 421 - DNA, 36 bp, Artificial Sequence
  Description of Artificial Sequence: Synthetic oligonucleotide
  modified_base (1)..(2): a, c, t, g, unknown or other
  modified_base (7)..(8): a, c, t, g, unknown or other
  modified_base (10)..(11): a, c, t, g, unknown or other
  modified_base (13)..(14): a, c, t, g, unknown or other
  modified_base (16)..(17): a, c, t, g, unknown or other
  modified_base (19)..(20): a, c, t, g, unknown or other
  modified_base (22)..(23): a, c, t, g, unknown or other
  modified_base (25)..(26): a, c, t, g, unknown or other
  modified_base (28)..(29): a, c, t, g, unknown or other
  modified_base (31)..(32): a, c, t, g, unknown or other
nnktwtnnknnknnknnknnknnknnknnknnkara

SEQ ID NO: 422 - DNA, 24 bp, Artificial Sequence
  Description of Artificial Sequence: Synthetic oligonucleotide
  modified_base (1)..(2): a, c, t, g, unknown or other
  modified_base (7)..(8): a, c, t, g, unknown or other
  modified_base (10)..(11): a, c, t, g, unknown or other
  modified_base (13)..(14): a, c, t, g, unknown or other
  modified_base (16)..(17): a, c, t, g, unknown or other
  modified_base (19)..(20): a, c, t, g, unknown or other
nnkwatnnknnknnknnknnkara

SEQ ID NO: 423 - DNA, 27 bp, Artificial Sequence
  Description of Artificial Sequence: Synthetic oligonucleotide
  modified_base (1)..(2): a, c, t, g, unknown or other
  modified_base (7)..(8): a, c, t, g, unknown or other
  modified_base (10)..(11): a, c, t, g, unknown or other
  modified_base (13)..(14): a, c, t, g, unknown or other
  modified_base (16)..(17): a, c, t, g, unknown or other
  modified_base (19)..(20): a, c, t, g, unknown or other
  modified_base (22)..(23): a, c, t, g, unknown or other
nnkwatnnknnknnknnknnknnkara

SEQ ID NO: 424 - DNA, 30 bp, Artificial Sequence
  Description of Artificial Sequence: Synthetic oligonucleotide
  modified_base (1)..(2): a, c, t, g, unknown or other
  modified_base (7)..(8): a, c, t, g, unknown or other
  modified_base (10)..(11): a, c, t, g, unknown or other
  modified_base (13)..(14): a, c, t, g, unknown or other
  modified_base (16)..(17): a, c, t, g, unknown or other
  modified_base (19)..(20): a, c, t, g, unknown or other
  modified_base (22)..(23): a, c, t, g, unknown or other
  modified_base (25)..(26): a, c, t, g, unknown or other
nnkwatnnknnknnknnknnknnknnkara

SEQ ID NO: 425 - DNA, 33 bp, Artificial Sequence
  Description of Artificial Sequence: Synthetic oligonucleotide
  modified_base (1)..(2): a, c, t, g, unknown or other
  modified_base (7)..(8): a, c, t, g, unknown or other
  modified_base (10)..(11): a, c, t, g, unknown or other
  modified_base (13)..(14): a, c, t, g, unknown or other
  modified_base (16)..(17): a, c, t, g, unknown or other
  modified_base (19)..(20): a, c, t, g, unknown or other
  modified_base (22)..(23): a, c, t, g, unknown or other
  modified_base (25)..(26): a, c, t, g, unknown or other
  modified_base (28)..(29): a, c, t, g, unknown or other
nnkwatnnknnknnknnknnknnknnknnkara

SEQ ID NO: 426 - DNA, 36 bp, Artificial Sequence
  Description of Artificial Sequence: Synthetic oligonucleotide
  modified_base (1)..(2): a, c, t, g, unknown or other
  modified_base (7)..(8): a, c, t, g, unknown or other
  modified_base (10)..(11): a, c, t, g, unknown or other
  modified_base (13)..(14): a, c, t, g, unknown or other
  modified_base (16)..(17): a, c, t, g, unknown or other
  modified_base (19)..(20): a, c, t, g, unknown or other
  modified_base (22)..(23): a, c, t, g, unknown or other
  modified_base (25)..(26): a, c, t, g, unknown or other
  modified_base (28)..(29): a, c, t, g, unknown or other
  modified_base (31)..(32): a, c, t, g, unknown or other
nnkwatnnknnknnknnknnknnknnknnknnkara

SEQ ID NO: 427 - protein, 278 aa, Artificial Sequence
  Description of Artificial Sequence: Synthetic polypeptide
GSHSMRYFFTSVSRPGRGEPRFIAVGYVDDTQFVRFDSDAASQKMEPRAPWIEQEGPEYWDQETRNMKAHSQTDRANLGTLRGAYNQSEDGSHTIQIMYGCDVGPDGRFLRGYRQDAYDGKDYIALNEDLRSWTAADMAAQITKRKWEAVHAAEQRRVYLEGRCVDGLRRYLENGKETLQRTDPPKTHMTHHPISDHEATLRCWALGFYPAEITLTWQRDGEDQTQDTELVETRPAGDGTFQKWAAVVVPSGEEQRYTCHVQHEGLPKPLTLRWELSS

SEQ ID NO: 428 - protein, 278 aa, Artificial Sequence
  Description of Artificial Sequence: Synthetic polypeptide
GSHSMRYFFTSVSRPGRGEPRFIAVGYVDDTQFVRFDSDAASQRMEPRAPWIEQEGPEYWDQETRNVKAQSQTDRVDLGTLRGAYNQSEAGSHTIQIMYGCDVGSDGRFLRGYRQDAYDGKDYIALNEDLRSWTAADMAAQITKRKWEAAHEAEQLRAYLDGTCVEWLRRYLENGKETLQRTDPPKTHMTHHPISDHEATLRCWALGFYPAEITLTWQRDGEDQTQDTELVETRPAGDGTFQKWAAVVVPSGEEQRYTCHVQHEGLPKPLTLRWELSS

SEQ ID NO: 429 - protein, 278 aa, Artificial Sequence
  Description of Artificial Sequence: Synthetic polypeptide
GSHSMRYFYTSVSRPGRGEPRFIAVGYVDDTQFVRFDSDAASQRMEPRAPWIEQEGPEYWDQETRNVKAQSQTDRVDLGTLRGAYNQSEDGSHTIQIMYGCDVGPDGRFLRGYRQDAYDGKDYIALNEDLRSWTAADMAAQITKRKWEAAHAAEQQRAYLEGRCVEWLRRYLENGKETLQRTDPPKTHMTHHPISDHEATLRCWALGFYPAEITLTWQRDGEDQTQDTELVETRPAGDGTFQKWAAVVVPSGEEQRYTCHVQHEGLPKPLTLRWELSS

SEQ ID NO: 430 - protein, 278 aa, Artificial Sequence
  Description of Artificial Sequence: Synthetic polypeptide
GSHSMRYFSTSVSRPGRGEPRFIAVGYVDDTQFVRFDSDAASQRMEPRAPWIEQEGPEYWDEETGKVKAHSQTDRENLRIALRAYNQSEAGSHTLQMMFGCDVGSDGRFLRGYHQYAYDGKDYIALKEDLRSWTAADMAAQITQRKWEAARVAEQLRAYLEGTCVDGLRRYLENGKETLQRTDPPKTHMTHHPISDHEATLRCWALGFYPAEITLTWQRDGEDQTQDTELVETRPAGDGTFQKWAAVVVPSGEEQRYTCHVQHEGLPKPLTLRWEPSS

SEQ ID NO: 431 - protein, 278 aa, Artificial Sequence
  Description of Artificial Sequence: Synthetic polypeptide
GSHSMRYFSTSVSRPGRGEPRFIAVGYVDDTQFVRFDSDAASQRMEPRAPWIEQEGPEYWDEETGKVKAHSQTDRENLRIALRAYNQSEAGSHTLQMMFGCDVGSDGRFLRGYHQYAYDGKDYIALKEDLRSWTAADMAAQITKRKWEAAHVAEQQRAYLEGTCVDGLRRYLENGKETLQRTDPPKTHMTHHPISDHEATLRCWALGFYPAEITLTWQRDGEDQTQDTELVETRPAGDGTFQKWAAVVVPSGEEQRYTCHVQHEGLPKPLTLRWEPSS

SEQ ID NO: 432 - protein, 278 aa, Artificial Sequence
  Description of Artificial Sequence: Synthetic polypeptide
GSHSMRYFSTSVSRPGSGEPRFIAVGYVDDTQFVRFDSDAASQRMEPRAPWIEQERPEYWDQETRNVKAQSQTDRVDLGTLRGAYNQSEAGSHTIQIMYGCDVGSDGRFLRGYEQHAYDGKDYIALNEDLRSWTAADMAAQITQRKWEAARWAEQLRAYLEGTCVEWLRRYLENGKETLQRTDPPKTHMTHHPISDHEATLRCWALGFYPAEITLTWQRDGEDQTQDTELVETRPAGDGTFQKWAAVVVPSGEEQRYTCHVQHEGLPKPLTLRWELSS

SEQ ID NO: 433 - protein, 278 aa, Artificial Sequence
  Description of Artificial Sequence: Synthetic polypeptide
GSHSMRYFTTSVSRPGRGEPRFIAVGYVDDTQFVRFDSDAASQRMEPRAPWIEQERPEYWDQETRNVKAHSQIDRVDLGTLRGAYNQSEAGSHTIQMMYGCDVGSDGRFLRGYQQDAYDGKDYIALNEDLRSWTAADMAAQITQRKWEAARVAEQLRAYLEGTCVEWLRRYLENGKETLQRTDPPKTHMTHHAVSDHEATLRCWALSFYPAEITLTWQRDGEDQTQDTELVETRPAGDGTFQKWASVVVPSGQEQRYTCHVQHEGLPKPLTLRWEPSS

SEQ ID NO: 434 - protein, 278 aa, Artificial Sequence
  Description of Artificial Sequence: Synthetic polypeptide
GSHSMRYFTTSVSRPGRGEPRFIAVGYVDDTQFVRFDSDAASQRMEPRAPWIEQEGPEYWDRNTRNVKAHSQIDRVDLGTLRGAYNQSEAGSHTIQMMYGCDVGSDGRFLRGYQQDAYDGKDYIALNEDLRSWTAADMAAQITQRKWEAARVAEQLRAYLEGTCVEWLRRYLENGKETLQRTDPPKTHMTHHAVSDHEATLRCWALSFYPAEITLTWQRDGEDQTQDTELVETRPAGDGTFQKWASVVVPSGQEQRYTCHVQHEGLPKPLTLRWEPSS

SEQ ID NO: 435 - protein, 278 aa, Artificial Sequence
  Description of Artificial Sequence: Synthetic polypeptide
GSHSMRYFYTSMSRPGRGEPRFIAVGYVDDTQFVRFDSDAASQRMEPRAPWIEQEGPEYWDRNTRNVKAQSQTDRVDLGTLRGAYNQSEAGSHTIQRMYGCDVGPDGRFLRGYHQYAYDGKDYIALKEDLRSWTAADMAAQTTKHKWEAAHVAEQWRAYLEGTCVEWLRRYLENGKETLQRTDAPKTHMTHHAVSDHEATLRCWALSFYPAEITLTWQRDGEDQTQDTELVETRPAGDGTFQKWVAVVVPSGQEQRYTCHVQHEGLPKPLTLRWEPSS

SEQ ID NO: 436 - protein, 278 aa, Artificial Sequence
  Description of Artificial Sequence: Synthetic polypeptide
GSHSMRYFYTSVSRPGRGEPRFISVGYVDDTQFVRFDSDAASPREEPRAPWIEQEGPEYWDRNTQIYKAQAQTDRESLRNLRGAYNQSEAGSHTLQSMYGCDVGPDGRLLRGHDQYAYDGKDYIALNEDLRSWTAADTAAQITQRKWEAAREAEQRRAYLEGECVEWLRRYLENGKDKLERADPPKTHVTHHPISDHEATLRCWALGFYPAEITLTWQRDGEDQTQDTELVETRPAGDRTFQKWAAVVVPSGEEQRYTCHVQHEGLPKPLTLRWEPSS

SEQ ID NO: 437 - protein, 278 aa, Artificial Sequence
  Description of Artificial Sequence: Synthetic polypeptide
GSHSMRYFDTAMSRPGRGEPRFISVGYVDDTQFVRFDSDAASPREEPRAPWIEQEGPEYWDRNTQIFKTNTQTDRESLRNLRGAYNQSEAGSHTLQSMYGCDVGPDGRLLRGHNQYAYDGKDYIALNEDLRSWTAADTAAQITQRKWEAARVAEQDRAYLEGTCVEWLRRYLENGKDTLERADPPKTHVTHHPISDHEATLRCWALGFYPAEITLTWQRDGEDQTQDTELVETRPAGDRTFQKWAAVVVPSGEEQRYTCHVQHEGLPKPLTLRWEPSS

SEQ ID NO: 438 - protein, 278 aa, Artificial Sequence
  Description of Artificial Sequence: Synthetic polypeptide
GSHSMRYFYTAMSRPGRGEPRFIAVGYVDDTQFVRFDSDAASPRMAPRAPWIEQEGPEYWDRETQISKTNTQTYRESLRNLRGAYNQSEAGSHTLQRMYGCDVGPDGRLLRGHDQSAYDGKDYIALNEDLSSWTAADTAAQITQRKWEAAREAEQWRAYLEGLCVEWLRRYLENGKETLQRADPPKTHVTHHPISDHEATLRCWALGFYPAEITLTWQRDGEDQTQDTELVETRPAGDRTFQKWAAVVVPSGEEQRYTCHVQHEGLPKPLTLRWEPSS

SEQ ID NO: 439 - protein, 278 aa, Artificial Sequence
  Description of Artificial Sequence: Synthetic polypeptide
GSHSMRYFHTAMSRPGRGEPRFITVGYVDDTLFVRFDSDATSPRKEPRAPWIEQEGPEYWDRETQISKTNTQTYRESLRNLRGAYNQSEAGSHTLQRMYGCDVGPDGRLLRGHNQYAYDGKDYIALNEDLRSWTAADTAAQISQRKLEAARVAEQLRAYLEGECVEWLRRYLENGKDKLERADPPKTHVTHHPISDHEATLRCWALGFYPAEITLTWQRDGEDQTQDTELVETRPAGDRTFQKWAAVVVPSGEEQRYTCHVQHEGLPKPLTLRWEPSS

SEQ ID NO: 440 - protein, 278 aa, Artificial Sequence
  Description of Artificial Sequence: Synthetic polypeptide
GSHSMRYFHTSVSRPGRGEPRFITVGYVDDTLFVRFDSDATSPRKEPRAPWIEQEGPEYWDRETQISKTNTQTYRESLRNLRGAYNQSEAGSHTLQSMYGCDVGPDGRLLRGHNQYAYDGKDYIALNEDLRSWTAADTAAQITQRKWEAARVAEQLRAYLEGECVEWLRRYLENGKETLQRADPPKTHVTHHPISDHEATLRCWALGFYPAEITLTWQRDGEDQTQDTELVETRPAGDRTFQKWAAVVVPSGEEQRYTCHVQHEGLPKPLTLRWEPSS

SEQ ID NO: 441 - protein, 278 aa, Artificial Sequence
  Description of Artificial Sequence: Synthetic polypeptide
GSHSMRYFYTAMSRPGRGEPRFITVGYVDDTLFVRFDSDATSPRKEPRAPWIEQEGPEYWDRETQISKTNTQTYRENLRTALRAYNQSEAGSHIIQRMYGCDVGPDGRLLRGYDQDAYDGKDYIALNEDLSSWTAADTAAQITQRKWEAARVAEQDRAYLEGLCVESLRRYLENGKETLQRADPPKTHVTHHPISDHEVTLRCWALGFYPAEITLTWQRDGEDQTQDTELVETRPAGDRTFQKWAAVVVPSGEEQRYTCHVQHEGLPKPLTLRWEPSS

SEQ ID NO: 442 - protein, 278 aa, Artificial Sequence
  Description of Artificial Sequence: Synthetic polypeptide
GSHSMRYFYTAMSRPGRGEPRFITVGYVDDTLFVRFDSDATSPRKEPRAPWIEQEGPEYWDRETQISKTNTQTYRENLRTALRAYNQSEAGSHIIQRMYGCDVGPDGRLLRGYDQDAYDGKDYIALNEDLSSWTAADTAAQITQRKWEAARVAEQLRAYLEGLCVESLRRYLENGKETLQRADPPKTHVTHHPISDHEVTLRCWALGFYPAEITLTWQRDGEDQTQDTELVETRPAGDRTFQKWAAVVVPSGEEQRYTCHVQHEGLPKPLTLRWEPSS

SEQ ID NO: 443 - protein, 278 aa, Artificial Sequence
  Description of Artificial Sequence: Synthetic polypeptide
GSHSMRYFYTAMSRPGRGEPRFIAVGYVDDTQFVRFDSDAASPRTEPRAPWIEQEGPEYWDRNTQIFKTNTQTYRENLRIALRAYNQSEAGSHTWQTMYGCDVGPDGRLLRGHNQYAYDGKDYIALNEDLSSWTAADTAAQITQRKWEAAREAEQLRAYLEGLCVEWLRRHLENGKETLQRADPPKTHVTHHPVSDHEATLRCWALGFYPAEITLTWQRDGEDQTQDTELVETRPAGDRTFQKWAAVVVPSGEEQRYTCHVQHEGLPKPLTLRWEPSS

SEQ ID NO: 444 - protein, 278 aa, Artificial Sequence
  Description of Artificial Sequence: Synthetic polypeptide
GSHSMRYFYTAMSRPGRGEPRFIAVGYVDDTQFVRFDSDAASPRTEPRAPWIEQEGPEYWDRNTQIFKTNTQTYRENLRIALRAYNQSEAGSHIIQRMYGCDLGPDGRLLRGHDQSAYDGKDYIALNEDLSSWTAADTAAQITQRKWEAARVAEQLRAYLEGLCVEWLRRYLENGKETLQRADPPKTHVTHHPVSDHEATLRCWALGFYPAEITLTWQRDGEDQTQDTELVETRPAGDRTFQKWAAVVVPSGEEQRYTCHVQHEGLPKPLTLRWEPSS

SEQ ID NO: 445 - protein, 278 aa, Artificial Sequence
  Description of Artificial Sequence: Synthetic polypeptide
GSHSMRYFYTAMSRPGRGEPRFIAVGYVDDTQFVRFDSDAASPRTEPRAPWIEQEGPEYWDGETRNMKASAQTYRENLRIALRAYNQSEAGSHIIQRMYGCDLGPDGRLLRGHDQSAYDGKDYIALNEDLSSWTAADTAAQITQRKWEAARVAEQLRAYLEGLCVEWLRRYLENGKETLQRADPPKTHVTHHPVSDHEATLRCWALGFYPAEITLTWQRDGEDQTQDTELVETRPAGDRTFQKWAAVVVPSGEEQRYTCHVQHEGLPKPLTLRWEPSS

SEQ ID NO: 446 - protein, 278 aa, Artificial Sequence
  Description of Artificial Sequence: Synthetic polypeptide
CSHSMKYFFTSVSRPGRGEPRFISVGYVDDTQFVRFDSDAASPRGEPRAPWVEQEGPEYWDRETQKYKRQAQTDRVSLRNLRGAYNQSEAGSHTLQWMCGCDLGPDGRLLRGYDQYAYDGKDYIALNEDLRSWTAADTAAQITQRKWEAAREAEQRRAYLEGTCVEWLRRYLENGKETLQRAEHPKTHVTHHPVSDHEATLRCWALGFYPAEITLTWQWDGEDQTQDTELVETRPAGDGTFQKWAAVMVPSGEEQRYTCHVQHEGLPEPLTLRWEPSS

SEQ ID NO: 447 - protein, 278 aa, Artificial Sequence
  Description of Artificial Sequence: Synthetic polypeptide
CSHSMRYFYTAVSRPSRGEPHFIAVGYVDDTQFVRFDSDAASPRGEPRAPWVEQEGPEYWDRETQKYKRQAQTDRVNLRKLRGAYNQSEAGSHTLQRMYGCDLGPDGRLLRGYDQSAYDGKDYIALNEDLRSWTAADTAAQITQRKWEAAREAEQWRAYLEGECVEWLRRYLENGKETLQRAEHPKTHVTHHPVSDHEATLRCWALGFYPTEITLTWQRDGEDQTQDTELVETRPAGDGTFQKWAAVVVPSGEEQRYTCHVQHEGLPEPLTLRWEPSS

SEQ ID NO: 448 - protein, 278 aa, Artificial Sequence
  Description of Artificial Sequence: Synthetic polypeptide
GSHSMRYFYTAVSRPGRGEPHFIAVGYVDDTQFVRFDSDAASPRGEPRAPWVEQEGPEYWDRETQKYKRQAQTDRVSLRNLRGAYNQSEAGSHIIQRMYGCDVGPDGRLLRGYDQYAYDGKDYIALNEDLRSWTAADTAAQITQRKWEAAREAEQLRAYLEGLCVEWLRRYLKNGKETLQRAEHPKTHVTHHPVSDHEATLRCWALGFYPAEITLTWQWDGEDQTQDTELVETRPAGDGTFQKWAAVVVPSGEEQRYTCHVQHEGLPEPLTLRWEPSS

SEQ ID NO: 449 - protein, 278 aa, Artificial Sequence
  Description of Artificial Sequence: Synthetic polypeptide
GSHSMRYFSTSVSWPGRGEPRFIAVGYVDDTQFVRFDSDAASPRGEPREPWVEQEGPEYWDRETQKYKRQAQADRVNLRKLRGAYNQSEDGSHTLQRMFGCDLGPDGRLLRGYNQFAYDGKDYIALNEDLRSWTAADTAAQITQRKWEAAREAEQRRAYLEGTCVEWLRRYLENGKETLQRAEHPKTHVTHHPVSDHEATLRCWALGFYPAEITLTWQWDGEDQTQDTELVETRPAGDGTFQKWAAVVVPSGEEQRYTCHVQHEGLPEPLTLRWKPSS

SEQ ID NO: 450 - protein, 278 aa, Artificial Sequence
  Description of Artificial Sequence: Synthetic polypeptide
CSHSMRYFYTAVSRPGRGEPRFIAVGYVDDTQFVQFDSDAASPRGEPRAPWVEQEGPEYWDRETQKYKRQAQTDRVNLRKLRGAYNQSEAGSHTLQRMYGCDLGPDGRLLRGYNQFAYDGKDYIALNEDLRSWTAADKAAQITQRKWEAAREAEQRRAYLEGTCVEWLRRYLENGKKTLQRAEHPKTHVTHHPVSDHEATLRCWALGFYPAEITLTWQRDGEDQTQDTELVETRPAGDGTFQKWAAVVVPSGEEQRYTCHVQHEGLPEPLTLRWGPSS

SEQ ID NO: 451 - protein, 278 aa, Artificial Sequence
  Description of Artificial Sequence: Synthetic polypeptide
CSHSMRYFDTAVSRPGRGEPRFISVGYVDDTQFVRFDSDAASPRGEPRAPWVEQEGPEYWDRETQKYKRQAQADRVNLRKLRGAYNQSEDGSHTLQWMYGCDLGPDGRLLRGYDQSAYDGKDYIALNEDLRSWTAADTAAQITQRKWEAAREAEQWRAYLEGTCVEWLRRYLENGKETLQRAEHPKTHVTHHPVSDHEATLRCWALGFYPAEITLTWQRDGEDQTQDTELVETRPAGDGTFQKWAAVVVPSGEEQRYTCHVQHEGLPEPLTLRWEPSS

SEQ ID NO: 452 - protein, 278 aa, Artificial Sequence
  Description of Artificial Sequence: Synthetic polypeptide
CSHSMRYFDTAVSRPGRGEPRFISVGYVDDTQFVRFDSDAASPRGEPRAPWVEQEGPEYWDRETQNYKRQAQADRVSLRNLRGAYNQSEDGSHTLQRMYGCDLGPDGRLLRGYDQSAYDGKDYIALNEDLRSWTAADTAAQITQRKLEAARAAEQLRAYLEGTCVEWLRRYLENGKETLQRAEPPKTHVTHHPLSDHEATLRCWALGFYPAEITLTWQRDGEDQTQDTELVETRPAGDGTFQKWAAVVVPSGQEQRYTCHMQHEGLQEPLTLSWEPSS

SEQ ID NO: 453 - protein, 278 aa, Artificial Sequence
  Description of Artificial Sequence: Synthetic polypeptide
CSHSMRYFDTAVSRPGRGEPRFISVGYVDDTQFVRFDSDAASPRGEPRAPWVEQEGPEYWDRETQKYKRQAQADRVSLRNLRGAYNQSEDGSHTLQRMSGCDLGPDGRLLRGYDQSAYDGKDYIALNEDLRSWTAADTAAQITQRKLEAARAAEQLRAYLEGTCVEWLRRYLENGKETLQRAEPPKTHVTHHPLSDHEATLRCWALGFYPAEITLTWQRDGEDQTQDTELVETRPAGDGTFQKWAAVVVPSGQEQRYTCHMQHEGLQEPLTLSWEPSS

SEQ ID NO: 454 - protein, 278 aa, Artificial Sequence
  Description of Artificial Sequence: Synthetic polypeptide
CSHSMRYFYTAVSRPGRGEPRFIAVGYVDDTQFVRFDSDAASPRGEPRAPWVEQEGPEYWDRETQKYKRQAQTDRVSLRNLRGAYNQSEAGSHTLQWMYGCDLGPDGRLLRGYDQSAYDGKDYIALNEDLRSWTAADTAAQITQRKWEAARAAEQQRAYLEGTCVEWLRRYLENGKETLQRAEHPKTHVTHHLVSDHEATLRCWALGFYPAEITLTWQRDGEDQTQDTELVETRPAGDGTFQKWAAVVVPSGEEQRYTCHVQHEGLPEPLTLRWEPSS

SEQ ID NO: 455 - protein, 278 aa, Artificial Sequence
  Description of Artificial Sequence: Synthetic polypeptide
GSHSLKYFHTSVSRPGRGEPRFISVGYVDDTQFVRFDNDAASPRMVPRAPWMEQEGSEYWDRETRSARDTAQIFRVNLRTLRGAYNQSEAGSHTLQWMHGCELGPDGRFLRGYEQFAYDGKDYLTLNEDLRSWTAVDTAAQISEQKSNDASEAEHQRAYLEDTCVEWLHKYLEKGKETLLHLEPPKTHVTHHPISDHEATLRCWALGFYPAEITLTWQQDGEGHTQDTELVETRPAGDGTFQKWAAVVVPSGEEQRYTCHVQHEGLPEPVTLRWKPAS

SEQ ID NO: 456 - DNA, 834 bp, Artificial Sequence
  Description of Artificial Sequence: Synthetic polynucleotide
ggctcccactccatgaggtatttcttcacatccgtgtcccggcccggccgcggggagccccgcttcatcgccgtgggctacgtggacgacacgcagttcgtgcggttcgacagcgacgccgcgagccagaagatggagccgcgggcgccgtggatagagcaggaggggccggagtattgggaccaggagacacggaatatgaaggcccactcacagactgaccgagcgaacctggggaccctgcgcggcgcctacaaccagagcgaggacggttctcacaccatccagataatgtatggctgcgacgtggggccggacgggcgcttcctccgcgggtaccggcaggacgcctacgacggcaaggattacatcgccctgaacgaggacctgcgctcttggaccgcggcggacatggcagctcagatcaccaagcgcaagtgggaggcggtccatgcggcggagcagcggagagtctacctggagggccggtgcgtggacgggctccgcagatacctggagaacgggaaggagacactgcagcgcacggacccccccaagacacatatgacccaccaccccatctctgaccatgaggccaccctgaggtgctgggccctgggcttctaccctgcggagatcacactgacctggcagcgggatggggaggaccagacccaggacacggagctcgtggagaccaggcctgcaggggatggaaccttccagaagtgggcggctgtggtggtgccttctggagaggagcagagatacacctgccatgtgcagcatgagggtctgcccaagcccctcaccctgagatgggagctgtcttcc

SEQ ID NO: 457 - DNA, 834 bp, Artificial Sequence
  Description of Artificial Sequence: Synthetic polynucleotide
ggctcccactccatgaggtatttcttcacatccgtgtcccggcccggccgcggggagccccgcttcatcgccgtgggctacgtggacgacacgcagttcgtgcggttcgacagcgacgccgcgagccagaggatggagccgcgggcgccgtggatagagcaggaggggccggagtattgggaccaggagacacggaatgtgaaggcccagtcacagactgaccgagtggacctggggaccctgcgcggcgcctacaaccagagcgaggccggttctcacaccatccagataatgtatggctgcgacgtggggtcggacgggcgcttcctccgcgggtaccggcaggacgcctacgacggcaaggattacatcgccctgaacgaggacctgcgctcttggaccgcggcggacatggcggctcagatcaccaagcgcaagtgggaggcggcccatgaggcggagcagttgagagcctacctggatggcacgtgcgtggagtggctccgcagatacctggagaacgggaaggagacactgcagcgcacggacccccccaagacacatatgacccaccaccccatctctgaccatgaggccaccctgaggtgctgggccctgggcttctaccctgcggagatcacactgacctggcagcgggatggggaggaccagacccaggacacggagctcgtggagaccaggcctgcaggggatggaaccttccagaagtgggcggctgtggtggtgccttctggagaggagcagagatacacctgccatgtgcagcatgagggtctgcccaagcccctcaccctgagatgggagctgtcttcc

SEQ ID NO: 458 - DNA, 834 bp, Artificial Sequence
  Description of Artificial Sequence: Synthetic polynucleotide
ggctcccactccatgaggtatttctacacctccgtgtcccggcccggccgcggggagccccgcttcatcgccgtgggctacgtggacgacacgcagttcgtgcggttcgacagcgacgccgcgagccagaggatggagccgcgggcgccgtggatagagcaggaggggccggagtattgggaccaggagacacggaatgtgaaggcccagtcacagactgaccgagtggacctggggaccctgcgcggcgcctacaaccagagcgaggacggttctcacaccatccagataatgtatggctgcgacgtggggccggacgggcgcttcctccgcgggtaccggcaggacgcctacgacggcaaggattacatcgccctgaacgaggacctgcgctcttggaccgcggcggacatggcagctcagatcaccaagcgcaagtgggaggcggcccatgcggcggagcagcagagagcctacctggagggccggtgcgtggagtggctccgcagatacctggagaacgggaaggagacactgcagcgcacggacccccccaagacacatatgacccaccaccccatctctgaccatgaggccaccctgaggtgctgggccctgggcttctaccctgcggagatcacactgacctggcagcgggatggggaggaccagacccaggacacggagctcgtggagaccaggcctgcaggggatggaaccttccagaagtgggcggctgtggtggtgccttctggagaggagcagagatacacctgccatgtgcagcatgagggtctgcccaagcccctcaccctgagatgggagctgtcttcc

SEQ ID NO: 459 - DNA, 834 bp, Artificial Sequence
  Description of Artificial Sequence: Synthetic polynucleotide
ggctcccactccatgaggtatttctccacatccgtgtcccggcccggccgcggggagccccgcttcatcgccgtgggctacgtggacgacacgcagttcgtgcggttcgacagcgacgccgcgagccagaggatggagccgcgggcgccgtggatagagcaggaggggccggagtattgggacgaggagacagggaaagtgaaggcccactcacagactgaccgagagaacctgcggatcgcgctccgcgcctacaaccagagcgaggccggttctcacaccctccagatgatgtttggctgcgacgtggggtcggacgggcgcttcctccgcgggtaccaccagtacgcctacgacggcaaggattacatcgccctgaaagaggacctgcgctcttggaccgcggcggacatggcggctcagatcacccagcgcaagtgggaggcggcccgtgtggcggagcagttgagagcctacctggagggcacgtgcgtggacgggctccgcagatacctggagaacgggaaggagacactgcagcgcacggacccccccaagacacatatgacccaccaccccatctctgaccatgaggccactctgagatgctgggccctgggcttctaccctgcggagatcacactgacctggcagcgggatggggaggaccagacccaggacacggagcttgtggagaccaggcctgcaggggatggaaccttccagaagtgggcagctgtggtggtaccttctggagaggagcagagatacacctgccatgtgcagcatgagggtctgcccaagcccctcaccctgagatgggagccatcttcc

SEQ ID NO: 460 - DNA, 834 bp, Artificial Sequence
  Description of Artificial Sequence: Synthetic polynucleotide
ggctcccactccatgaggtatttctccacatccgtgtcccggcccggccgcggggagccccgcttcatcgccgtgggctacgtggacgacacgcagttcgtgcggttcgacagcgacgccgcgagccagaggatggagccgcgggcgccgtggatagagcaggaggggccggagtattgggacgaggagacagggaaagtgaaggcccactcacagactgaccgagagaacctgcggatcgcgctccgcgcctacaaccagagcgaggccggttctcacaccctccagatgatgtttggctgcgacgtggggtcggacgggcgcttcctccgcgggtaccaccagtacgcctacgacggcaaggattacatcgccctgaaagaggacctgcgctcttggaccgcggcggacatggcggctcagatcaccaagcgcaagtgggaggcggcccatgtggcggagcagcagagagcctacctggagggcacgtgcgtggacgggctccgcagatacctggagaacgggaaggagacactgcagcgcacggacccccccaagacacatatgacccaccaccccatctctgaccatgaggccactctgagatgctgggccctgggcttctaccctgcggagatcacactgacctggcagcgggatggggaggaccagacccaggacacggagcttgtggagaccaggcctgcaggggatggaaccttccagaagtgggcagctgtggtggtaccttctggagaggagcagagatacacctgccatgtgcagcatgagggtctgcccaagcccctcaccctgagatgggagccatcttcc

SEQ ID NO: 461 - DNA, 834 bp, Artificial Sequence
  Description of Artificial Sequence: Synthetic polynucleotide
ggctcccactccatgaggtatttctccacatccgtgtcccggcccggcagtggagagccccgcttcatcgcagtgggctacgtggacgacacgcagttcgtgcggttcgacagcgacgccgcgagccagaggatggagccgcgggcgccgtggatagagcaggagaggcctgagtattgggaccaggagacacggaatgtgaaggcccagtcacagactgaccgagtggacctggggaccctgcgcggcgcctacaaccagagcgaggccggttctcacaccatccagataatgtatggctgcgacgtggggtcggacgggcgcttcctccgcgggtatgaacagcacgcctacgacggcaaggattacatcgccctgaacgaggacctgcgctcttggaccgcggcggacatggcggctcagatcacccagcgcaagtgggaggcggcccgttgggcggagcagttgagagcctacctggagggcacgtgcgtggagtggctccgcagatacctggagaacgggaaggagacactgcagcgcacggacccccccaagacacatatgacccaccaccccatctctgaccatgaggccaccctgaggtgctgggccctgggcttctaccctgcggagatcacactgacctggcagcgggatggggaggaccagacccaggacacggagctcgtggagaccaggcctgcaggggatggaaccttccagaagtgggcggctgtggtggtgccttctggagaggagcagagatacacctgccatgtgcagcatgagggtctgcccaagcccctcaccctgagatgggagctgtcttcc

SEQ ID NO: 462 - DNA, 834 bp, Artificial Sequence
  Description of Artificial Sequence: Synthetic polynucleotide
ggctcccactccatgaggtatttcaccacatccgtgtcccggcccggccgcggggagccccgcttcatcgccgtgggctacgtggacgacacgcagttcgtgcggttcgacagcgacgccgcgagccagaggatggagccgcgggcgccgtggatagagcaggagaggcctgagtattgggaccaggagacacggaatgtgaaggcccactcacagattgaccgagtggacctggggaccctgcgcggcgcctacaaccagagcgaggccggttctcacaccatccagatgatgtatggctgcgacgtggggtcggacgggcgcttcctccgcgggtaccagcaggacgcctacgacggcaaggattacatcgccttgaacgaggacctgcgctcttggaccgcggcggacatggcggctcagatcacccagcgcaagtgggaggcggcccgtgtggcggagcagttgagagcctacctggagggcacgtgcgtggagtggctccgcagatacctggagaacgggaaggagacactgcagcgcacggacccccccaagacgcatatgactcaccacgctgtctctgaccatgaggccaccctgaggtgctgggccctgagcttctaccctgcggagatcacactgacctggcagcgggatggggaggaccagacccaggacacggagctcgtggagaccaggcctgcaggggatggaaccttccagaagtgggcgtctgtggtggtgccttctggacaggagcagagatacacctgccatgtgcagcatgagggtctccccaagcccctcaccctgagatgggagccgtcttcc

SEQ ID NO: 463 - DNA, 834 bp, Artificial Sequence
  Description of Artificial Sequence: Synthetic polynucleotide
ggctcccactccatgaggtatttcaccacatccgtgtcccggcccggccgcggggagccccgcttcatcgccgtgggctacgtggacgacacgcagttcgtgcggttcgacagcgacgccgcgagccagaggatggagccgcgggcgccgtggatagagcaggaggggccggagtattgggaccggaacacacggaatgtgaaggcccactcacagattgaccgagtggacctggggaccctgcgcggcgcctacaaccagagcgaggccggttctcacaccatccagatgatgtatggctgcgacgtggggtcggacgggcgcttcctccgcgggtaccagcaggacgcctacgacggcaaggattacatcgccttgaacgaggacctgcgctcttggaccgcggcggacatggcggctcagatcacccagcgcaagtgggaggcggcccgtgtggcggagcagttgagagcctacctggagggcacgtgcgtggagtggctccgcagatacctggagaacgggaaggagacactgcagcgcacggacccccccaagacgcatatgactcaccacgctgtctctgaccatgaggccaccctgaggtgctgggccctgagcttctaccctgcggagatcacactgacctggcagcgggatggggaggaccagacccaggacacggagctcgtggagaccaggcctgcaggggatggaaccttccagaagtgggcgtctgtggtggtgccttctggacaggagcagagatacacctgccatgtgcagcatgagggtctccccaagcccctcaccctgagatgggagccgtcttcc

SEQ ID NO: 464 - DNA, 834 bp, Artificial Sequence
  Description of Artificial Sequence: Synthetic polynucleotide
ggctcccactccatgaggtatttctacacctccatgtcccggcccggccgcggggagccccgcttcatcgccgtgggctacgtggacgacacgcagttcgtgcggttcgacagcgacgccgcgagccagaggatggagccgcgggcgccgtggatagagcaggaggggccggagtattgggaccggaacacacggaatgtgaaggcccagtcacagactgaccgagtggacctggggaccctgcgcggcgcctacaaccagagcgaggccggttctcacaccatccagaggatgtatggctgcgacgtggggccggacgggcgcttcctccgcgggtaccaccagtacgcctacgacggcaaggattacatcgccctgaaagaggacctgcgctcttggaccgcggcggacatggcagctcagaccaccaagcacaagtgggaggcggcccatgtggcggagcagtggagagcctacctggagggcacgtgcgtggagtggctccgcagatacctggagaacgggaaggagacactgcagcgcacggacgcccccaaaacgcatatgactcaccacgctgtctctgaccatgaagccaccctgaggtgctgggccctgagcttctaccctgcggagatcacactgacctggcagcgggatggggaggaccagacccaggacacggagctcgtggagaccaggcctgcaggggatggaaccttccagaagtgggtggctgtggtggtgccttctggacaggagcagagatacacctgccatgtgcagcatgagggtttgcccaagcccctcaccctgagatgggagccgtcttcc

SEQ ID NO: 465 - DNA, 834 bp, Artificial Sequence
  Description of Artificial Sequence: Synthetic polynucleotide
ggctcccactccatgaggtatttctacacctccgtgtcccggcccggccgcggggagccccgcttcatctcagtgggctacgtggacgacacccagttcgtgaggttcgacagcgacgccgcgagtccgagagaggagccgcgggcgccgtggatagagcaggaggggccggagtattgggaccggaacacacagatctacaaggcccaggcacagactgaccgagagagcctgcggaacctgcgcggcgcctacaaccagagcgaggccgggtctcacaccctccagagcatgtacggctgcgacgtggggccggacgggcgcctcctccgcgggcatgaccagtacgcctacgacggcaaggattacatcgccctgaacgaggacctgcgctcctggaccgccgcggacacggcggctcagatcacccagcgcaagtgggaggcggcccgtgaggcggagcagcggagagcctacctggagggcgagtgcgtggagtggctccgcagatacctggagaacgggaaggacaagctggagcgcgctgaccccccaaagacacacgtgacccaccaccccatctctgaccatgaggccaccctgaggtgctgggccctgggtttctaccctgcggagatcacactgacctggcagcgggatggcgaggaccaaactcaggacactgagcttgtggagaccagaccagcaggagatagaaccttccagaagtgggcagctgtggtggtgccttctggagaagagcagagatacacatgccatgtacagcatgaggggctgccgaagcccctcaccctgagatgggagccgtcttcc

SEQ ID NO: 466 - DNA, 834 bp, Artificial Sequence
  Description of Artificial Sequence: Synthetic polynucleotide
ggctcccactccatgaggtatttcgacaccgccatgtcccggcccggccgcggggagccccgcttcatctcagtgggctacgtggacgacacgcagttcgtgaggttcgacagcgacgccgcgagtccgagagaggagccgcgggcgccgtggatagagcaggaggggccggagtattgggaccggaacacacagatcttcaagaccaacacacagactgaccgagagagcctgcggaacctgcgcggcgcctacaaccagagcgaggccgggtctcacaccctccagagcatgtacggctgcgacgtggggccggacgggcgcctcctccgcgggcataaccagtacgcctacgacggcaaggattacatcgccctgaacgaggacctgcgctcctggaccgcggcggacaccgcggctcagatcacccagcgcaagtgggaggcggcccgtgtggcggagcaggacagagcctacctggagggcacgtgcgtggagtggctccgcagatacctggagaacgggaaggacacgctggagcgcgcggaccccccaaagacacacgtgacccaccaccccatctctgaccatgaggccaccctgaggtgctgggccctgggcttctaccctgcggagatcacactgacctggcagcgggatggcgaggaccaaactcaggacactgagcttgtggagaccagaccagcaggagatagaaccttccagaagtgggcagctgtggtggtgccttctggagaagagcagagatacacatgccatgtacagcatgaggggctgccgaagcccctcaccctgagatgggagccgtcttcc

SEQ ID NO: 467 - DNA, 834 bp, Artificial Sequence
  Description of Artificial Sequence: Synthetic polynucleotide
ggctcccactccatgaggtatttctacaccgccatgtcccggcccggccgcggggagccccgcttcatcgcagtgggctacgtggacgacacccagttcgtgaggttcgacagcgacgccgcgagtccgaggatggcgccccgggcgccatggatagagcaggaggggccggagtattgggaccgggagacacagatctccaagaccaacacacagacttaccgagagagcctgcggaacctgcgcggcgcctacaaccagagcgaggccgggtctcacaccctccagaggatgtacggctgcgacgtggggccggacgggcgcctcctccgcgggcatgaccagtccgcctacgacggcaaggattacatcgccctgaacgaggacctgagctcctggaccgcggcggacacggcggctcagatcacccagcgcaagtgggaggcggcccgtgaggcggagcagtggagagcctacctggagggcctgtgcgtggagtggctccgcagatacctggagaacgggaaggagacactgcagcgcgcggaccccccaaagacacatgtgacccaccaccccatctctgaccatgaggccaccctgaggtgctgggccctgggcttctaccctgcggagatcacactgacctggcagcgggatggcgaggaccaaactcaggacaccgagcttgtggagaccagaccagcaggagatagaaccttccagaagtgggcagctgtggtggtgccttctggagaagagcagagatacacatgccatgtacagcatgaggggctgccgaagcccctcaccctgagatgggagccatcttcc

SEQ ID NO: 468 - DNA, 834 bp, Artificial Sequence
  Description of Artificial Sequence: Synthetic polynucleotide
ggctcccactccatgaggtatttccacaccgccatgtcccggcccggccgcggggagccccgcttcatcaccgtgggctacgtggacgacacgctgttcgtgaggttcgacagcgacgccacgagtccgaggaaggagccgcgggcgccatggatagagcaggaggggccggagtattgggaccgggagacacagatctccaagaccaacacacagacttaccgagagagcctgcggaacctgcgcggcgcctacaaccagagcgaggccgggtctcacaccctccagaggatgtacggctgcgacgtggggccggacgggcgcctcctccgcgggcataaccagtacgcctacgacggcaaggattacatcgccctgaacgaggacctgcgctcctggaccgccgcggacacggcggctcagatctcccagcgcaagttggaggcggcccgtgtggcggagcagctgagagcctacctggagggcgagtgcgtggagtggctccgcagatacctggagaacgggaaggacaagctggagcgcgctgaccccccaaagacacacgtgacccaccaccccatctctgaccatgaggccaccctgaggtgctgggccctgggtttctaccctgcggagatcacactgacctggcagcgggatggcgaggaccaaactcaggacactgagcttgtggagaccagaccagcaggagatagaaccttccagaagtgggcagctgtggtggtgccttctggagaagagcagagatacacatgccatgtacagcatgaggggctgccgaagcccctcaccctgagatgggagccgtcttcc

SEQ ID NO: 469 - DNA, 834 bp, Artificial Sequence
  Description of Artificial Sequence: Synthetic polynucleotide
ggctcccactccatgaggtatttccacacctccgtgtcccggcccggccgcggggagccccgcttcatcaccgtgggctacgtggacgacacgctgttcgtgaggttcgacagcgacgccacgagtccgaggaaggagccgcgggcgccatggatagagcaggaggggccggagtattgggaccgggagacacagatctccaagaccaacacacagacttaccgagagagcctgcggaacctgcgcggcgcctacaaccagagcgaggccgggtctcacaccctccagagcatgtacggctgcgacgtggggccggacgggcgcctcctccgcgggcataaccagtacgcctacgacggcaaggattacatcgccctgaacgaggacctgcgctcctggaccgccgcggacacggcggctcagatcacccagcgcaagtgggaggcggcccgtgtggcggagcagctgagagcctacctggagggcgagtgcgtggagtggctccgcagatacctggagaacgggaaggagacactgcagcgcgcggaccccccaaagacacacgtgacccaccaccccatctctgaccatgaggccaccctgaggtgctgggccctgggcttctaccctgcggagatcacactgacctggcagcgggatggcgaggaccaaactcaggacactgagcttgtggagaccagaccagcaggagatagaaccttccagaagtgggcagctgtggtggtgccttctggagaagagcagagatacacatgccatgtacagcatgaggggctgccgaagcccctcaccctgagatgggagccgtcttcc

SEQ ID NO: 470 - DNA, 834 bp, Artificial Sequence
  Description of Artificial Sequence: Synthetic polynucleotide
ggctcccactccatgaggtatttctacaccgccatgtcccggcccggccgcggggagccccgcttcatcaccgtgggctacgtggacgacacgctgttcgtgaggttcgacagcgacgccacgagtccgaggaaggagccgcgggcgccatggatagagcaggaggggccggagtattgggaccgggagacacagatctccaagaccaacacacagacttaccgagagaacctgcgcaccgcgctccgcgcctacaaccagagcgaggccgggtctcacatcatccagaggatgtacggctgcgacgtggggccggacgggcgcctcctccgcgggtatgaccaggacgcctacgacggcaaggattacatcgccctgaacgaggacctgagctcctggaccgcggcggacaccgcggctcagatcacccagcgcaagtgggaggcggcccgtgtggcggagcaggacagagcctacctggagggcctgtgcgtggagtcgctccgcagatacctggagaacgggaaggagacactgcagcgcgcggaccccccaaagacacatgtgacccaccaccccatctctgaccatgaggtcaccctgaggtgctgggccctgggcttctaccctgcggagatcacactgacctggcagcgggatggcgaggaccaaactcaggacaccgagcttgtggagaccagaccagcaggagatagaaccttccagaagtgggcagctgtggtggtgccttctggagaagagcagagatacacatgccatgtacagcatgaggggctgccgaagcccctcaccctgagatgggagccgtcttcc

SEQ ID NO: 471 - DNA, 834 bp, Artificial Sequence
  Description of Artificial Sequence: Synthetic polynucleotide
ggctcccactccatgaggtatttctacaccgccatgtcccggcccggccgcggggagccccgcttcatcaccgtgggctacgtggacgacacgctgttcgtgaggttcgacagcgacgccacgagtccgaggaaggagccgcgggcgccatggatagagcaggaggggccggagtattgggaccgggagacacagatctccaagaccaacacacagacttaccgagagaacctgcgcaccgcgctccgcgcctacaaccagagcgaggccgggtctcacatcatccagaggatgtacggctgcgacgtggggccggacgggcgcctcctccgcgggtatgaccaggacgcctacgacggcaaggattacatcgccctgaacgaggacctgagctcctggaccgcggcggacaccgcggctcagatcacccagcgcaagtgggaggcggcccgtgtggcggagcagctgagagcctacctggagggcctgtgcgtggagtcgctccgcagatacctggagaacgggaaggagacactgcagcgcgcggaccccccaaagacacatgtgacccaccaccccatctctgaccatgaggtcaccctgaggtgctgggccctgggcttctaccctgcggagatcacactgacctggcagcgggatggcgaggaccaaactcaggacaccgagcttgtggagaccagaccagcaggagatagaaccttccagaagtgggcagctgtggtggtgccttctggagaagagcagagatacacatgccatgtacagcatgaggggctgccgaagcccctcaccctgagatgggagccgtcttcc

SEQ ID NO: 472 - DNA, 834 bp, Artificial Sequence
  Description of Artificial Sequence: Synthetic polynucleotide
ggctcccactccatgaggtatttctacaccgccatgtcccggcccggccgcggggagccccgcttcattgcagtgggctacgtggacgacacccagttcgtgaggttcgacagcgacgccgcgagtccgaggacggagccccgggcgccatggatagagcaggaggggccggagtattgggaccggaacacacagatcttcaagaccaacacacagacttaccgagagaacctgcggatcgcgctccgcgcctacaaccagagcgaggccgggtctcacacttggcagacgatgtatggctgcgacgtggggccggacgggcgcctcctccgcgggcataaccagtacgcctacgacggcaaagattacatcgccctgaacgaggacctgagctcctggaccgcggcggacaccgcggctcagatcacccagcgcaagtgggaggcggcccgtgaggcggagcagctgagagcctacctggagggcctgtgcgtggagtggctccgcagacacctggagaacgggaaggagacactgcagcgcgcggaccccccaaagacacacgtgacccaccacccagtctctgaccatgaggccaccctgaggtgctgggccctgggcttctaccctgcggagatcacactgacctggcagcgggatggcgaggaccaaactcaggacactgagcttgtggagaccagaccagcaggagatagaaccttccagaagtgggcagctgtggtggtgccttctggagaagagcagagatacacatgccatgtacagcatgaggggctgccgaagcccctcaccctgagatgggagccatcttcc

SEQ ID NO: 473 - DNA, 834 bp, Artificial Sequence
  Description of Artificial Sequence: Synthetic polynucleotide
ggctcccactccatgaggtatttctacaccgccatgtcccggcccggccgcggggagccccgcttcatcgcagtgggctacgtggacgacacccagttcgtgaggttcgacagcgacgccgcgagtccgaggacggagccccgggcgccatggatagagcaggaggggccggagtattgggaccggaacacacagatcttcaagaccaacacacagacttaccgagagaacctgcggatcgcgctccgcgcctacaaccagagcgaggccgggtctcacatcatccagaggatgtatggctgcgacctggggcccgacgggcgcctcctccgcgggcatgaccagtccgcctacgacggcaaggattacatcgccctgaacgaggacctgagctcctggaccgcggcggacaccgcggctcagatcacccagcgcaagtgggaggcggcccgtgtggcggagcagctgagagcctacctggagggcctgtgcgtggagtggctccgcagatacctggagaacgggaaggagacactgcagcgcgcggaccccccaaagacacacgtgacccaccacccagtctctgaccatgaggccaccctgaggtgctgggccctgggcttctaccctgcggagatcacactgacctggcagcgggatggcgaggaccaaactcaggacactgagcttgtggagaccagaccagcaggagatagaaccttccagaagtgggcagctgtggtggtgccttctggagaagagcagagatacacatgccatgtacagcatgaggggctgccgaagcccctcaccctgagatgggagccatcttcc

SEQ ID NO: 474 - DNA, 834 bp, Artificial Sequence
  Description of Artificial Sequence: Synthetic polynucleotide
ggctcccactccatgaggtatttctacaccgccatgtcccggcccggccgcggggagccccgcttcatcgcagtgggctacgtggacgacacccagttcgtgaggttcgacagcgacgccgcgagtccgaggacggagccccgggcgccatggatagagcaggaggggccggagtattgggacggggagacacggaacatgaaggcctccgcgcagacttaccgagagaacctgcggatcgcgctccgcgcctacaaccagagcgaggccgggtctcacatcatccagaggatgtatggctgcgacctggggcccgacgggcgcctcctccgcgggcatgaccagtccgcctacgacggcaaggattacatcgccctgaacgaggacctgagctcctggaccgcggcggacaccgcggctcagatcacccagcgcaagtgggaggcggcccgtgtggcggagcagctgagagcctacctggagggcctgtgcgtggagtggctccgcagatacctggagaacgggaaggagacactgcagcgcgcggaccccccaaagacacacgtgacccaccacccagtctctgaccatgaggccaccctgaggtgctgggccctgggcttctaccctgcggagatcacactgacctggcagcgggatggcgaggaccaaactcaggacactgagcttgtggagaccagaccagcaggagatagaaccttccagaagtgggcagctgtggtggtgccttctggagaagagcagagatacacatgccatgtacagcatgaggggctgccgaagcccctcaccctgagatgggagccatcttcc

SEQ ID NO: 475 - DNA, 834 bp, Artificial Sequence
  Description of Artificial Sequence: Synthetic polynucleotide
tgctcccactccatgaagtatttcttcacatccgtgtcccggcctggccgcggagagccccgcttcatctcagtgggctacgtggacgacacgcagttcgtgcggttcgacagcgacgccgcgagtccgagaggggagccgcgggcgccgtgggtggagcaggaggggccggagtattgggaccgggagacacagaagtacaagcgccaggcacagactgaccgagtgagcctgcggaacctgcgcggcgcctacaaccagagcgaggccgggtctcacaccctccagtggatgtgtggctgcgacctggggcccgacgggcgcctcctccgcgggtatgaccagtacgcctacgacggcaaggattacatcgccctgaacgaggacctgcgctcctggaccgccgcggacaccgcggctcagatcacccagcgcaagtgggaggcggcccgtgaggcggagcagcggagagcctacctggagggcacgtgcgtggagtggctccgcagatacctggagaacgggaaggagacactgcagcgcgcggaacacccaaagacacacgtgacccaccatccagtctctgaccatgaggccaccctgaggtgctgggccctgggcttctaccctgcggagatcacactgacctggcagtgggatggggaggaccaaactcaggacaccgagcttgtggagaccaggccagcaggagatggaaccttccagaagtgggcagctgtgatggtgccttctggagaagagcagagatacacgtgccatgtgcagcacgaggggctgccggagcccctcaccctgagatgggagccgtcttcc

SEQ ID NO: 476 - DNA, 834 bp, Artificial Sequence
  Description of Artificial Sequence: Synthetic polynucleotide
tgctcccactccatgaggtatttctacaccgctgtgtcccggcccagccgcggagagccccacttcatcgcagtgggctacgtggacgacacgcagttcgtgcggttcgacagcgacgccgcgagtccaagaggggagccgcgggcgccgtgggtggagcaggaggggccggagtattgggaccgggagacacagaagtacaagcgccaggcacagactgaccgagtgaacctgcggaaactacgcggcgcctacaaccagagcgaggccgggtctcacaccctccagaggatgtacggctgcgacctggggcccgacgggcgcctcctccgcgggtatgaccagtccgcctacgacggcaaggattacatcgccctgaacgaggacctgcgctcctggaccgccgcggacacagcggctcagatcacccagcgcaagtgggaggcggcccgtgaggcggagcagtggagagcctacctggagggcgagtgcgtggagtggctccgcagatacctggagaacgggaaggagacactgcagcgcgcggaacacccaaagacacacgtgacccaccatccagtctctgaccatgaggccaccctgaggtgctgggccctgggcttctaccctacggagatcacactgacctggcagcgggatggcgaggaccaaactcaggacaccgagcttgtggagaccaggccagcaggagatggaaccttccagaagtgggcagctgtggtggtgccttctggagaagagcagagatacacgtgccatgtgcagcacgaggggctgccggagcccctcaccctgagatgggagccatcttcc

SEQ ID NO: 477 - DNA, 834 bp, Artificial Sequence
  Description of Artificial Sequence: Synthetic polynucleotide
ggctcccactccatgaggtatttctacaccgctgtgtcccggcccggccgcggggagccccacttcatcgcagtgggctacgtggacgacacgcagttcgtgcggttcgacagcgacgccgcgagtccgagaggggagccgcgggcgccgtgggtggagcaggaggggccggagtattgggaccgggagacacagaagtacaagcgccaggcacagactgaccgagtgagcctgcggaacctgcgcggcgcctacaaccagagcgaggccgggtctcacatcatccagaggatgtatggctgcgacgtggggcccgacgggcgcctcctccgcgggtatgaccagtacgcctacgacggcaaggattacatcgccctgaacgaggatctgcgctcctggaccgccgcggacacggcggctcagatcacccagcgcaagtgggaggcggcccgtgaggcggagcagctgagagcctacctggagggcctgtgcgtggagtggctccgcagatacctgaagaatgggaaggagacactgcagcgcgcggaacacccaaagacacacgtgacccaccatccagtctctgaccatgaggccaccctgaggtgctgggccctgggcttctaccctgcggagatcacactgacctggcagtgggatggggaggaccaaactcaggacactgagcttgtggagaccaggccagcaggagatggaaccttccagaagtgggcagctgtggtggtgccttctggagaagagcagagatacacgtgccatgtgcagcacgaggggctgccggagcccctcaccctgagatgggagccgtcttcc

SEQ ID NO: 478 - DNA, 834 bp, Artificial Sequence
  Description of Artificial Sequence: Synthetic polynucleotide
ggctcccactccatgaggtatttctccacatccgtgtcctggcccggccgcggggagccccgcttcatcgcagtgggctacgtggacgacacgcagttcgtgcggttcgacagcgacgccgcgagtccaagaggggagccgcgggagccgtgggtggagcaggaggggccggagtattgggaccgggagacacagaagtacaagcgccaggcacaggctgaccgagtgaacctgcggaaactgcgcggcgcctacaaccagagcgaggacgggtctcacaccctccagaggatgtttggctgcgacctggggccggacgggcgcctcctccgcgggtataaccagttcgcctacgacggcaaggattacatcgccctgaacgaggatctgcgctcctggaccgccgcggacacggcggctcagatcacccagcgcaagtgggaggcggcccgtgaggcggagcagcggagagcctacctggagggcacgtgcgtggagtggctccgcagatacctggagaacgggaaggagacactgcagcgcgcggaacacccaaagacacacgtgacccaccatccagtctctgaccatgaggccaccctgaggtgctgggccctgggcttctaccctgcggagatcacactgacctggcagtgggatggggaggaccaaactcaggacaccgagcttgtggagaccaggccagcaggagatggaaccttccagaagtgggcagctgtggtggtgccttctggagaagagcagagatacacgtgccatgttcagcacgaggggctgccggagcccctcaccctgagatggaagccgtcttcc

SEQ ID NO: 479 - DNA, 834 bp, Artificial Sequence
  Description of Artificial Sequence: Synthetic polynucleotide
tgctcccactccatgaggtatttctacaccgccgtgtcccggcccggccgcggagagccccgcttcatcgcagtgggctacgtggacgacacgcagttcgtgcagttcgacagcgacgccgcgagtccaagaggggagccgcgggcgccgtgggtggagcaggaggggccggagtattgggaccgggagacacagaagtacaagcgccaggcacagactgaccgagtgaacctgcggaaactgcgcggcgcctacaaccagagcgaggccgggtctcacaccctccagaggatgtatggctgcgacctggggcccgacgggcgcctcctccgcgggtataaccagttcgcctacgacggcaaggattacatcgccctgaatgaggacctgcgctcctggaccgccgcggacaaggcggctcagatcacccagcgcaagtgggaggcggcccgtgaggcggagcagcggagagcctacctggagggcacgtgcgtggagtggctccgcagatacctggagaacgggaagaagacgctgcagcgcgcggaacacccaaagacacacgtgacccaccatccagtctctgaccatgaggccaccctgaggtgctgggccctgggcttctaccctgcggagatcacactgacctggcagcgggatggcgaggaccaaactcaggacaccgagcttgtggagaccaggccagcaggagatggaaccttccagaagtgggcagctgtggtggtgccttctggagaagagcagagatacacgtgccatgtgcagcacgaggggctgccagagcccctcaccctgagatgggggccatcttcc

SEQ ID NO: 480 - DNA, 834 bp, Artificial Sequence
  Description of Artificial Sequence: Synthetic polynucleotide
tgctcccactccatgaggtatttcgacaccgccgtgtcccggcccggccgcggagagccccgcttcatctcagtgggctacgtggacgacacgcagttcgtgcggttcgacagcgacgccgcgagtccgagaggggagccccgggcgccgtgggtggagcaggaggggccggagtattgggaccgggagacacagaagtacaagcgccaggcacaggctgaccgagtgaacctgcggaaactgcgcggcgcctacaaccagagcgaggacgggtctcacaccctccagtggatgtatggctgcgacctggggcccgacgggcgcctcctccgcgggtatgaccagtccgcctacgacggcaaggattacatcgccctgaacgaggacctgcgctcctggaccgccgcggacacggcggctcagatcacccagcgcaagtgggaggcggcccgtgaggcggagcagtggagagcctacctggagggcacgtgcgtggagtggctccgcagatacctggagaacgggaaggagacactgcagcgcgcggaacacccaaagacacacgtgacccaccatccagtctctgaccatgaggccaccctgaggtgctgggccctgggcttctaccctgcggagatcacactgacctggcagcgggatggcgaggaccaaactcaggacaccgagcttgtggagaccaggccagcaggagatggaaccttccagaagtgggcagctgtggtggtgccttctggagaagagcagagatacacgtgccatgtgcagcacgaggggctgccagagcccctcaccctgagatgggagccatcttcc

SEQ ID NO: 481 - DNA, 834 bp, Artificial Sequence
  Description of Artificial Sequence: Synthetic polynucleotide
tgctcccactccatgaggtatttcgacaccgccgtgtcccggcccggccgcggagagccccgcttcatctcagtgggctacgtggacgacacgcagttcgtgcggttcgacagcgacgccgcgagtccgagaggggagccgcgggcgccgtgggtggagcaggaggggccggagtattgggaccgggagacacagaactacaagcgccaggcacaggctgaccgagtgagcctgcggaacctgcgcggcgcctacaaccagagcgaggacgggtctcacaccctccagaggatgtatggctgcgacctggggcccgacgggcgcctcctccgcgggtatgaccagtccgcctacgacggcaaggattacatcgccctgaacgaggacctgcgctcctggaccgccgcggacaccgcggctcagatcacccagcgcaagttggaggcggcccgtgcggcggagcagctgagagcctacctggagggcacgtgcgtggagtggctccgcagatacctggagaacgggaaggagacactgcagcgcgcagaacccccaaagacacacgtgacccaccaccccctctctgaccatgaggccaccctgaggtgctgggccctgggcttctaccctgcggagatcacactgacctggcagcgggatggggaggaccagacccaggacaccgagcttgtggagaccaggccagcaggagatggaaccttccagaagtgggcagctgtggtggtgccttctggacaagagcagagatacacgtgccatatgcagcacgaggggctgcaagagcccctcaccctgagctgggagccatcttcc

SEQ ID NO: 482 - DNA, 834 bp, Artificial Sequence
  Description of Artificial Sequence: Synthetic polynucleotide
tgctcccactccatgaggtatttcgacaccgccgtgtcccggcccggccgcggagagccccgcttcatctcagtgggctacgtggacgacacgcagttcgtgcggttcgacagcgacgccgcgagtccgagaggggagccgcgggcgccgtgggtggagcaggaggggccggagtattgggaccgggagacacagaagtacaagcgccaggcacaggctgaccgagtgagcctgcggaacctgcgcggcgcctacaaccagagcgaggacgggtctcacaccctccagaggatgtctggctgcgacctggggcccgacgggcgcctcctccgcgggtatgaccagtccgcctacgacggcaaggattacatcgccctgaacgaggacctgcgctcctggaccgccgcggacaccgcggctcagatcacccagcgcaagttggaggcggcccgtgcggcggagcagctgagagcctacctggagggcacgtgcgtggagtggctccgcagatacctggagaacgggaaggagacactgcagcgcgcagaacccccaaagacacacgtgacccaccaccccctctctgaccatgaggccaccctgaggtgctgggccctgggcttctaccctgcggagatcacactgacctggcagcgggatggggaggaccagacccaggacaccgagcttgtggagaccaggccagcaggagatggaaccttccagaagtgggcagctgtggtggtgccttctggacaagagcagagatacacgtgccatatgcagcacgaggggctgcaagagcccctcaccctgagctgggagccatcttcc

SEQ ID NO: 483 - DNA, 834 bp, Artificial Sequence
  Description of Artificial Sequence: Synthetic polynucleotide
tgctcccactccatgaggtatttctacaccgccgtgtcccggcccggccgcggagagccccgcttcatcgcagtgggctacgtggacgacacgcagttcgtgcggttcgacagcgacgccgcgagtccaagaggggagccgcgggcgccgtgggtggagcaggaggggccggagtattgggaccgggagacacagaagtacaagcgccaggcacagactgaccgagtgagcctgcggaacctgcgcggcgcctacaaccagagcgaggccgggtctcacaccctccagtggatgtatggctgcgacctggggcccgacgggcgcctcctccgcgggtatgaccagtccgcctacgacggcaaggattacatcgccctgaacgaggacctgcgctcctggaccgccgcggacacggcggctcagatcacccagcgcaagtgggaggcggcccgtgcggcggagcagcagagagcctacctggagggcacgtgcgtggagtggctccgcagatacctggagaacgggaaggagacactgcagcgcgcggaacacccaaagacacacgtgacccaccatttggtctctgaccatgaggccaccctgaggtgctgggccctgggcttctaccctgcggagatcacactgacctggcagcgggatggcgaggaccaaactcaggacaccgagcttgtggagaccaggccagcaggagatggaaccttccagaagtgggcagctgtggtggtgccttctggagaagagcagagatacacgtgccatgtgcagcacgaggggctgccggagcccctcaccctgagatgggagccatcttcc

SEQ ID NO: 484 - DNA, 834 bp, Artificial Sequence
  Description of Artificial Sequence: Synthetic polynucleotide
ggctcccactccttgaagtatttccacacttccgtgtcccggcccggccgcggggagccccgcttcatctctgtgggctacgtggacgacacccagttcgtgcgcttcgacaacgacgccgcgagtccgaggatggtgccgcgggcgccgtggatggagcaggaggggtcagagtattgggaccgggagacacggagcgccagggacaccgcacagattttccgagtgaacctgcggacgctgcgcggcgcctacaatcagagcgaggccgggtctcacaccctgcagtggatgcatggctgcgagctggggcccgacgggcgcttcctccgcgggtatgaacagttcgcctacgacggcaaggattatctcaccctgaatgaggacctgcgctcctggaccgcggtggacacggcggctcagatctccgagcaaaagtcaaatgatgcctctgaggcggagcaccagagagcctacctggaagacacatgcgtggagtggctccacaaatacctggagaaggggaaggagacactgcttcacctggagcccccaaagacacacgtgactcaccaccccatctctgaccatgaggccaccctgaggtgctgggccctgggcttctaccctgcggagatcacactgacctggcagcaggatggggagggccatacccaggacacggagctcgtggagaccaggcctgcaggggatggaaccttccagaagtgggcagctgtggtggtgccttctggagaggagcagagatacacgtgccatgtgcagcatgaggggctacccgagcccgtcaccctgagatggaagccggcttcc

SEQ ID NO: 485 - DNA, 5219 bp, Artificial Sequence
  Description of Artificial Sequence: Synthetic polynucleotide
acggattagaagccgccgagcgggtgacagccctccgaaggaagactctcctccgtgcgtcctcgtcttcaccggtcgcgttcctgaaacgcagatgtgcctcgcgccgcactgctccgaacaataaagattctacaatactagcttttatggttatgaagaggaaaaattggcagtaacctggccccacaaaccttcaaatgaacgaatcaaattaacaaccataggatgataatgcgattagttttttagccttatttctggggtaattaatcagcgaagcgatgatttttgatctattaacagatatataaatgcaaaaactgcataaccactttaactaatactttcaacattttcggtttgtattacttcttattcaaatgtaataaaagtatcaacaaaaaattgttaatatacctctatactttaacgtcaaggagaaaaaaccccggatcggactactagcagctgtaatacgactcactatagggaatattaagctaattctacttcatacattttcaattaagatgcagttacttcgctgtttttcaatattttctgttattgctagcgttttggctggtggaggaggttctggaggtggtggtagtggtggtggtggttccatacaaagaactccaaagatccaagtttacagtagacatcctgctgaaaacggtaaatctaatttcttgaactgttacgtctccggtttccacccaagtgatatagaagttgacttgttgaaaaatggtgaaagaatcgaaaaggttgaacattcagatttgtctttttctaaggactggtccttctatttgttgtactacacagaattcactccaactgaaaaggatgaatacgcttgcagagttaatcatgtaaccttgtctcaacctaaaatcgttaagtgggatagagacatgggtggaggtggaagtggaggtggcggttcaggtggtggcggttccggtggaggtggatccgaacaaaagcttatctccgaagaagacttgggtggtggtggatctggtggtggtggttctggtggtggtggttctcaggaactgacaactatatgcgagcaaatcccctcaccaactttagaatcgacgccgtactctttgtcaacgactactattttggccaacgggaaggcaatgcaaggagtttttgaatattacaaatcagtaacgtttgtcagtaattgcggttctcacccctcaacaactagcaaaggcagccccataaacacacagtatgttttttgagtttaaacccgctgatctgataacaacagtgtagatgtaacaaaatcgactttgttcccactgtacttttagctcgtacaaaatacaatatacttttcatttctccgtaaacaacatgttttcccatgtaatatccttttctatttttcgttccgttaccaactttacacatactttatatagctattcacttctatacactaaaaaactaagacaattttaattttgctgcctgccatatttcaatttgttataaattcctataatttatcctattagtagctaaaaaaagatgaatgtgaatcgaatcctaagagaattgggcaagtgcacaaacaatacttaaataaatactactcagtaataacctatttcttagcatttttgacgaaatttgctattttgttagagtcttttacaccatttgtctccacacctccgcttacatcaacaccaataacgccatttaatctaagcgcatcaccaacattttctggcgtcagtccaccagctaacataaaatgtaagctctcggggctctcttgccttccaacccagtcagaaatcgagttccaatccaaaagttcacctgtcccacctgcttctgaatcaaacaagggaataaacgaatgaggtttctgtgaagctgcactgagtagtatgttgcagtcttttggaaatacgagtcttttaataactggcaaaccgaggaactcttggtattcttgccacgactcatctccgtgcagttggacgatatcaatgccgtaatcattgaccagagccaaaacatcctccttaggttgattacgaaacacgccaaccaagtatttcggagtgcctgaactatttttatatgcttttacaagacttgaaattttccttgcaataaccgggtcaattgttctctttctattgggcacacatataatacccagcaagtcagcatcggaatctagagcacattctgcggcctctgtgctctgcaagccgcaaactttcaccaatggaccagaactacctgtgaaattaataacagacatactccaagctgcctttgtgtgcttaatcacgtatactcacgtgctcaatagtcaccaatgccctccctcttggccctctccttttcttttttcgaccgaatttcttgaagacgaaagggcctcgtgatacgcctatttttataggttaatgtcatgataataatggtttcttaggacggatcgcttgcctgtaacttacacgcgcctcgtatcttttaatgatggaataatttgggaatttactctgtgtttatttatttttatgttttgtatttggattttagaaagtaaataaagaaggtagaagagttacggaatgaagaaaaaaaaataaacaaaggtttaaaaaatttcaacaaaaagcgtactttacatatatatttattagacaagaaaagcagattaaatagatatacattcgattaacgataagtaaaatgtaaaatcacaggattttcgtgtgtggtcttctacacagacaagatgaaacaattcggcattaatacctgagagcaggaagagcaagataaaaggtagtatttgttggcgatccccctagagtcttttacatcttcggaaaacaaaaactattttttctttaatttctttttttactttctatttttaatttatatatttatattaaaaaatttaaattataattatttttatagcacgtgatgaaaaggacccaggtggcacttttcggggaaatgtgcgcggaacccctatttgtttatttttctaaatacattcaaatatgtatccgctcatgagacaataaccctgataaatgcttcaataatattgaaaaaggaagagtatgagtattcaacatttccgtgtcgcccttattcccttttttgcggcattttgccttcctgtttttgctcacccagaaacgctggtgaaagtaaaagatgctgaagatcagttgggtgcacgagtgggttacatcgaactggatctcaacagcggtaagatccttgagagttttcgccccgaagaacgttttccaatgatgagcacttttaaagttctgctatgtggcgcggtattatcccgtgttgacgccgggcaagagcaactcggtcgccgcatacactattctcagaatgacttggttgagtactcaccagtcacagaaaagcatcttacggatggcatgacagtaagagaattatgcagtgctgccataaccatgagtgataacactgcggccaacttacttctgacaacgatcggaggaccgaaggagctaaccgcttttttgcacaacatgggggatcatgtaactcgccttgatcgttgggaaccggagctgaatgaagccataccaaacgacgagcgtgacaccacgatgcctgtagcaatggcaacaacgttgcgcaaactattaactggcgaactacttactctagcttcccggcaacaattaatagactggatggaggcggataaagttgcaggaccacttctgcgctcggcccttccggctggctggtttattgctgataaatctggagccggtgagcgtgggtctcgcggtatcattgcagcactggggccagatggtaagccctcccgtatcgtagttatctacacgacgggcagtcaggcaactatggatgaacgaaatagacagatcgctgagataggtgcctcactgattaagcattggtaactgtcagaccaagtttactcatatatactttagattgatttaaaacttcatttttaatttaaaaggatctaggtgaagatcctttttgataatctcatgaccaaaatcccttaacgtgagttttcgttccactgagcgtcagaccccgtagaaaagatcaaaggatcttcttgagatcctttttttctgcgcgtaatctgctgcttgcaaacaaaaaaaccaccgctaccagcggtggtttgtttgccggatcaagagctaccaactctttttccgaaggtaactggcttcagcagagcgcagataccaaatactgtccttctagtgtagccgtagttaggccaccacttcaagaactctgtagcaccgcctacatacctcgctctgctaatcctgttaccagtggctgctgccagtggcgataagtcgtgtcttaccgggttggactcaagacgatagttaccggataaggcgcagcggtcgggctgaacggggggttcgtgcacacagcccagcttggagcgaacgacctacaccgaactgagatacctacagcgtgagcattgagaaagcgccacgcttcccgaagggagaaaggcggacaggtatccggtaagcggcagggtcggaacaggagagcgcacgagggagcttccaggggggaacgcctggtatctttatagtcctgtcgggtttcgccacctctgacttgagcgtcgatttttgtgatgctcgtcaggggggccgagcctatggaaaaacgccagcaacgcggcctttttacggttcctggccttttgctggccttttgctcacatgttctttcctgcgttatcccctgattctgtggataaccgtattaccgcctttgagtgagctgataccgctcgccgcagccgaacgaccgagcgcagcgagtcagtgagcgaggaagcggaagagcgcccaatacgcaaaccgcctctccccgcgcgttggccgattcattaatgcagctggcacgacaggtttcccgactggaaagcgggcagtgagcgcaacgcaattaatgtgagttacctcactcattaggcaccccaggctttacactttatgcttccggctcctatgttgtgtggaattgtgagcggataacaatttcacacaggaaacagctatgaccatgattacgccaagctcggaattaaccctcactaaagggaacaaaagctggctagt

SEQ ID NO: 486 - DNA, 5009 bp, Artificial Sequence
  Description of Artificial Sequence: Synthetic polynucleotide
acggattagaagccgccgagcgggtgacagccctccgaaggaagactctcctccgtgcgtcctcgtcttcaccggtcgcgttcctgaaacgcagatgtgcctcgcgccgcactgctccgaacaataaagattctacaatactagcttttatggttatgaagaggaaaaattggcagtaacctggccccacaaaccttcaaatgaacgaatcaaattaacaaccataggatgataatgcgattagttttttagccttatttctggggtaattaatcagcgaagcgatgatttttgatctattaacagatatataaatgcaaaaactgcataaccactttaactaatactttcaacattttcggtttgtattacttcttattcaaatgtaataaaagtatcaacaaaaaattgttaatatacctctatactttaacgtcaaggagaaaaaaccccggatcggactactagcagctgtaatacgactcactatagggaatattaagctaattctacttcatacattttcaattaagatgcagttacttcgctgtttttcaatattttctgttattgcttcagttttagcacaggaactgacaactatatgcgagcaaatcccctcaccaactttagaatcgacgccgtactctttgtcaacgactactattttggccaacgggaaggcaatgcaaggagtttttgaatattacaaatcagtaacgtttgtcagtaattgcggttctcacccctcaacaactagcaaaggcagccccataaacacacagtatgtttttaagcttctgcaggctagtggtggtggtggttctggtggtggtggttctggtggtggtggttctgctagcatgactggtggacagcaaatgggtcgggatctgtacgacgatgacgataaggtaccaggatccagtgtggtggaattctgcagatatccagcacagtggcggccgctcgagtctagagggcccttcgaaggtaagcctatccctaaccctctcctcggtctcgattctacgcgtaccggtcatcatcaccatcaccattgagtttaaacccgctgatctgataacaacagtgtagatgtaacaaaatcgactttgttcccactgtacttttagctcgtacaaaatacaatatacttttcatttctccgtaaacaacatgttttcccatgtaatatccttttctatttttcgttccgttaccaactttacacatactttatatagctattcacttctatacactaaaaaactaagacaattttaattttgctgcctgccatatttcaatttgttataaattcctataatttatcctattagtagctaaaaaaagatgaatgtgaatcgaatcctaagagaattgggcaagtgcacaaacaatacttaaataaatactactcagtaataacctatttcttagcatttttgacgaaatttgctattttgttagagtcttttacaccatttgtctccacacctccgcttacatcaacaccaataacgccatttaatctaagcgcatcaccaacattttctggcgtcagtccaccagctaacataaaatgtaagctctcggggctctcttgccttccaacccagtcagaaatcgagttccaatccaaaagttcacctgtcccacctgcttctgaatcaaacaagggaataaacgaatgaggtttctgtgaagctgcactgagtagtatgttgcagtcttttggaaatacgagtcttttaataactggcaaaccgaggaactcttggtattcttgccacgactcatctccgtgcagttggacgatatcaatgccgtaatcattgaccagagccaaaacatcctccttaggttgattacgaaacacgccaaccaagtatttcggagtgcctgaactatttttatatgcttttacaagacttgaaattttccttgcaataaccgggtcaattgttctctttctattgggcacacatataatacccagcaagtcagcatcggaatctagagcacattctgcggcctctgtgctctgcaagccgcaaactttcaccaatggaccagaactacctgtgaaattaataacagacatactccaagctgcctttgtgtgcttaatcacgtatactcacgtgctcaatagtcaccaatgccctccctcttggccctctccttttcttttttcgaccgaatttcttgaagacgaaagggcctcgtgatacgcctatttttataggttaatgtcatgataataatggtttcttaggacggatcgcttgcctgtaacttacacgcgcctcgtatcttttaatgatggaataatttgggaatttactctgtgtttatttatttttatgttttgtatttggattttagaaagtaaataaagaaggtagaagagttacggaatgaagaaaaaaaaataaacaaaggtttaaaaaatttcaacaaaaagcgtactttacatatatatttattagacaagaaaagcagattaaatagatatacattcgattaacgataagtaaaatgtaaaatcacaggattttcgtgtgtggtcttctacacagacaagatgaaacaattcggcattaatacctgagagcaggaagagcaagataaaaggtagtatttgttggcgatccccctagagtcttttacatcttcggaaaacaaaaactattttttctttaatttctttttttactttctatttttaatttatatatttatattaaaaaatttaaattataattatttttatagcacgtgatgaaaaggacccaggtggcacttttcggggaaatgtgcgcggaacccctatttgtttatttttctaaatacattcaaatatgtatccgctcatgagacaataaccctgataaatgcttcaataatattgaaaaaggaagagtatgagtattcaacatttccgtgtcgcccttattcccttttttgcggcattttgccttcctgtttttgctcacccagaaacgctggtgaaagtaaaagatgctgaagatcagttgggtgcacgagtgggttacatcgaactggatctcaacagcggtaagatccttgagagttttcgccccgaagaacgttttccaatgatgagcacttttaaagttctgctatgtggcgcggtattatcccgtgttgacgccgggcaagagcaactcggtcgccgcatacactattctcagaatgacttggttgagtactcaccagtcacagaaaagcatcttacggatggcatgacagtaagagaattatgcagtgctgccataaccatgagtgataacactgcggccaacttacttctgacaacgatcggaggaccgaaggagctaaccgcttttttgcacaacatgggggatcatgtaactcgccttgatcgttgggaaccggagctgaatgaagccataccaaacgacgagcgtgacaccacgatgcctgtagcaatggcaacaacgttgcgcaaactattaactggcgaactacttactctagcttcccggcaacaattaatagactggatggaggcggataaagttgcaggaccacttctgcgctcggcccttccggctggctggtttattgctgataaatctggagccggtgagcgtgggtctcgcggtatcattgcagcactggggccagatggtaagccctcccgtatcgtagttatctacacgacgggcagtcaggcaactatggatgaacgaaatagacagatcgctgagataggtgcctcactgattaagcattggtaactgtcagaccaagtttactcatatatactttagattgatttaaaacttcatttttaatttaaaaggatctaggtgaagatcctttttgataatctcatgaccaaaatcccttaacgtgagttttcgttccactgagcgtcagaccccgtagaaaagatcaaaggatcttcttgagatcctttttttctgcgcgtaatctgctgcttgcaaacaaaaaaaccaccgctaccagcggtggtttgtttgccggatcaagagctaccaactctttttccgaaggtaactggcttcagcagagcgcagataccaaatactgtccttctagtgtagccgtagttaggccaccacttcaagaactctgtagcaccgcctacatacctcgctctgctaatcctgttaccagtggctgctgccagtggcgataagtcgtgtcttaccgggttggactcaagacgatagttaccggataaggcgcagcggtcgggctgaacggggggttcgtgcacacagcccagcttggagcgaacgacctacaccgaactgagatacctacagcgtgagcattgagaaagcgccacgcttcccgaagggagaaaggcggacaggtatccggtaagcggcagggtcggaacaggagagcgcacgagggagcttccaggggggaacgcctggtatctttatagtcctgtcgggtttcgccacctctgacttgagcgtcgatttttgtgatgctcgtcaggggggccgagcctatggaaaaacgccagcaacgcggcctttttacggttcctggccttttgctggccttttgctcacatgttctttcctgcgttatcccctgattctgtggataaccgtattaccgcctttgagtgagctgataccgctcgccgcagccgaacgaccgagcgcagcgagtcagtgagcgaggaagcggaagagcgcccaatacgcaaaccgcctctccccgcgcgttggccgattcattaatgcagctggcacgacaggtttcccgactggaaagcgggcagtgagcgcaacgcaattaatgtgagttacctcactcattaggcaccccaggctttacactttatgcttccggctcctatgttgtgtggaattgtgagcggataacaatttcacacaggaaacagctatgaccatgattacgccaagctcggaattaaccctcactaaagggaacaaaagctggctagt

SEQ ID NO: 487 - protein, 50 aa, Artificial Sequence
  Description of Artificial Sequence: Synthetic polypeptide
  MISC_FEATURE (1)..(50): This sequence may encompass 1-10 "Gly Gly Gly Gly Ser" repeating units
GGGGSGGGGSGGGGSGGGGSGGGGSGGGGSGGGGSGGGGSGGGGSGGGGS
